(19) United States
(12) Patent Application Publication
(10) Pub. No.: US 2007/0037186 A1
(43) Pub. Date: Feb. 15, 2007

(54) Thyroid fine needle aspiration molecular assay

(76) Inventors: Yuqiu Jiang, San Diego, CA (US); John W. Backus, Ontario, NY (US); Abhijit Mazumder, Basking Ridge, NJ (US); Dondapati Chowdary, Princeton Junction, NJ (US); Fei Yang, Eugene, OR (US); Yixin Wang, San Diego, CA (US); Timothy Jatkoe, San Diego, CA (US)

Correspondence Address: PHILIP S. JOHNSON;JOHNSON & JOHNSON, ONE JOHNSON & JOHNSON PLAZA, NEW BRUNSWICK, NJ, 08933-7003, US

(21) Appl. No.: 11/435,266

(22) Filed: May 16, 2006

Related U.S. Application Data
(60) Provisional application No. 60/683,173, filed on May 20, 2005.

(51) Int. Cl. C12Q 1/68; G01N 33/574

(52) U.S. Cl. 435/6; 435/7.23

(57) ABSTRACT

The present invention relates to methods, compositions and articles directed to diagnosing thyroid carcinoma, differentiating between thyroid carcinoma and benign thyroid diseases, testing indeterminate thyroid fine needle aspirate samples of thyroid nodules, and determining patient protocols and outcomes.

### STATEMENT REGARDING FEDERALLY SPONSORED RESEARCH OR DEVELOPMENT

[0001] No government funds were used to make this invention.

### REFERENCE TO SEQUENCE LISTING, OR A COMPUTER PROGRAM LISTING COMPACT DISK APPENDIX

[0002] Reference to a “Sequence Listing,” a table, or a computer program listing appendix submitted on a compact disc and an incorporation by reference of the material on the compact disc including duplicates and the files on each compact disc are hereby specified.

### BACKGROUND OF THE INVENTION

[0003] This application claims the benefit of U.S. Provisional Application No. 60/683,173, filed May 20, 2005.

[0004] There are approximately 25,600 new cases of thyroid carcinoma diagnosed in the United States each year, and 1,400 patients will die of the disease. About 75% of all thyroid cancers belong to the papillary thyroid carcinoma type. The rest consist of 10% follicular carcinoma, 5% to 9% medullary thyroid cancer, 1% to 2% anaplastic cancer, 1% to 3% lymphoma, and less than 1% sarcoma and other rare tumors. Usually a lump (nodule) in the thyroid is the first sign of thyroid cancer. There are 10 to 18 million people in US with a single thyroid nodule, and approximately 490,000 become clinically apparent each year. Fortunately only about 5% of these nodules are cancerous.

[0005] The commonly used method for thyroid cancer diagnosis is fine needle aspiration (FNA) biopsy. FNA samples are examined cytologically to determine whether the nodules are benign or cancerous. The sensitivity and specificity of FNA range from 68% to 98%, and 72% to 100% respectively, depending on institutions and doctors. Unfortunately, in 25% of the cases the specimens are either inadequate for diagnosis or indeterminable by cytology. In current medical practice, patients with indeterminate results are sent to surgery, with consequence that only 25% have cancer and 75% end up with unnecessary surgery. A molecular assay with high sensitivity and a better specificity (higher than 25%) would greatly improve current diagnostic accuracy of thyroid cancer, and omit unnecessary surgery for non-cancerous patients.

[0006] Comparative genomic hybridization (CGH), serial analysis of gene expression (SAGE), and DNA microarray have been used to identify genetic events occurring in thyroid cancers such as loss of heterozygosity, up and down gene regulation, and genetic rearrangements. PAX8 and PPARγ genetic rearrangement event has been demonstrated to be associated with follicular thyroid cancer (FTC). Rearrangement of the ret proto-oncogene is related to papillary thyroid cancer (PTC). Down-regulation of thyroid peroxidase (TPO) gene is observed in both FTC and PTC. Galectin-3 was reported to be a candidate marker to differentiate malignant thyroid neoplasms from benign lesions. However, there are other studies demonstrating that Galectin-3 is not a cancer-specific marker. Many genes purported to be useful in thyroid cancer diagnosis lack the sensitivity and specificity required for an accurate molecular assay.

### SUMMARY OF THE INVENTION

[0007] The present invention encompasses methods of diagnosing thyroid cancer by obtaining a biological sample from a patient; and measuring the expression levels in the sample of genes selected from the group consisting of those encoding mRNA: corresponding to SEQ ID NOs: 36, 53, 73, 211 and 242; and/or corresponding to SEQ ID NOs: 199, 207, 255 and 354; or recognized specifically by the probe sets selected from the group consisting of psids corresponding to SEQ ID NOs: 36, 53, 73, 211 and 242 as depicted in Table 25; and/or recognized specifically by the probe sets selected from the group consisting of psids corresponding to SEQ ID NOs: 199, 207, 255 and 354 as depicted in Table 25; where the gene expression levels above or below pre-determined cut-off levels are indicative of thyroid cancer.

[0008] The present invention encompasses methods of differentiating between thyroid carcinoma and benign thyroid diseases by obtaining a sample from a patient; and measuring the expression levels in the sample of genes selected from the group consisting of those encoding mRNA: corresponding to SEQ ID NOs: 36, 53, 73, 211 and 242; and/or corresponding to SEQ ID NOs: 199, 207, 255 and 354; or recognized specifically by the probe sets selected from the group consisting of psids corresponding to SEQ ID NOs: 36, 53, 73, 211 and 242 as depicted in Table 25; and/or recognized specifically by the probe sets selected from the group consisting of psids corresponding to SEQ ID NOs: 199, 207, 255 and 354 as depicted in Table 25; where the gene expression levels above or below pre-determined cut-off levels are indicative of thyroid carcinoma.

[0009] The present invention encompasses methods of testing indeterminate thyroid fine needle aspirate (FNA) thyroid nodule samples by: obtaining a sample from a patient; and measuring the expression levels in the sample of genes selected from the group consisting of those encoding mRNA: corresponding to SEQ ID NOs: 36, 53, 73, 211 and 242; and/or corresponding to SEQ ID NOs: 199, 207, 255 and 354; or recognized specifically by the probe sets selected from the group consisting of psids corresponding to SEQ ID NOs: 36, 53, 73, 211 and 242 as depicted in Table 25; and/or recognized specifically by the probe sets selected from the group consisting of psids corresponding to SEQ ID NOs: 199, 207, 255 and 354 as depicted in Table 25; where the gene expression levels above or below predetermined cut-off levels are indicative of thyroid cancer.

[0010] The present invention encompasses methods of determining thyroid cancer patient treatment protocol by: obtaining a biological sample from a thyroid cancer patient; and measuring the expression levels in the sample of genes selected from the group consisting of those encoding mRNA: corresponding to SEQ ID NOs: 36, 53, 73, 211 and 242; and/or corresponding to SEQ ID NOs: 199, 207, 255 and 354; or recognized specifically by the probe sets selected from the group consisting of psids corresponding to SEQ ID NOs: 36, 53, 73, 211 and 242 as depicted in Table 25; and/or recognized specifically by the probe sets selected from the group consisting of psids corresponding to SEQ ID NOs: 199, 207, 255 and 354 as depicted in Table 25; where the gene expression levels above or below pre-determined cut-off levels are sufficiently indicative of cancer to enable a physician to determine the type of surgery and/or therapy recommend to treat the disease.

[0011] The present invention encompasses methods of treating a thyroid cancer patient by obtaining a biological sample from a thyroid cancer patient; and measuring the expression levels in the sample of genes selected from the group consisting of those encoding mRNA: corresponding to SEQ ID NOs: 36, 53, 73, 211 and 242; and/or corresponding to SEQ ID NOs: 199, 207, 255 and 354; or recognized specifically by the probe sets selected from the group consisting of psids corresponding to SEQ ID NOs: 36, 53, 73, 211 and 242 as depicted in Table 25; and/or recognized specifically by the probe sets selected from the group consisting of psids corresponding to SEQ ID NOs: 199, 207, 255 and 354 as depicted in Table 25; where the gene expression levels above or below pre-determined cut-off levels are indicative of cancer; and treating the patient with a thyroidectomy if they are cancer positive.

[0012] The present invention encompasses methods of cross validating a gene expression profile for thyroid carcinoma patients by: a. obtaining gene expression data from a statistically significant number of patient biological samples; b. randomizing sample order; c. setting aside data from about 10%-50% of samples; d. computing, for the remaining samples, for factor of interest on all variables and selecting variables that meet a p-value cutoff (p); e. selecting variables that fit a prediction model using a forward search and evaluating the training error until it hits a predetermined error rate; f. testing the prediction model on the left-out 10-50% of samples; g. repeating steps c., -g. with a new set of samples removed; and h. continuing steps c)-g) until 100% of samples have been tested and record classification performance.

[0013] The present invention encompasses methods of independently validating a gene expression profile and gene profiles obtained thereby for thyroid carcinoma patients by obtaining gene expression data from a statistically significant number of patient biological samples; normalizing the source variabilities in the gene expression data; computing for factor of interest on all variables that were selected previously; and testing the prediction model on the sample and record classification performance.

[0014] The present invention encompasses a method of generating a posterior probability score to enable diagnosis of thyroid carcinoma patients by: obtaining gene expression data from a statistically significant number of patient biological samples; applying linear discrimination analysis to the data to obtain selected genes; and applying weighted expression levels to the selected genes with discriminate function factor to obtain a prediction model that can be applied as a posterior probability score.

[0015] The present invention encompasses methods of generating a thyroid carcinoma prognostic patient report and reports obtained thereby, by obtaining a biological sample from the patient; measuring gene expression of the sample; applying a posterior probability thereto; and using the results obtained thereby to generate the report.

[0016] The present invention encompasses compositions containing at least one probe set selected from the group consisting of: SEQ ID NOs: 36, 53, 73, 211 and 242; and/or SEQ ID NOs: 199, 207, 255 and 354; or the psids corresponding to SEQ ID NOs: 36, 53, 73, 211 and 242; and/or SEQ ID NOs: 199, 207, 255 and 354 as depicted in Table 25.

[0017] The present invention encompasses kits for conducting an assay to determine thyroid carcinoma diagnosis in a biological sample containing: materials for detecting isolated nucleic acid sequences, their complements, or portions thereof of a combination of genes selected from the group consisting of those encoding mRNA: corresponding to SEQ ID NOs: 36, 53, 73, 211 and 242; and/or corresponding to SEQ ID NOs: 199, 207, 255 and 354; or recognized specifically by the probe sets selected from the group consisting of psids corresponding to SEQ ID NOs: 36, 53, 73, 211 and 242 as depicted in Table 25; and/or recognized specifically by the probe sets selected from the group consisting of psids corresponding to SEQ ID NOs: 199, 207, 255 and 354 as depicted in Table 25.

[0018] The present invention encompasses articles for assessing thyroid carcinoma status containing: materials for detecting isolated nucleic acid sequences, their complements, or portions thereof of a combination of genes selected from the group consisting of those encoding mRNA: corresponding to SEQ ID NOs: 36, 53, 73, 211 and 242; and/or corresponding to SEQ ID NOs: 199, 207, 255 and 354; or recognized specifically by the probe sets selected from the group consisting of psids corresponding to SEQ ID NOs: 36, 53, 73, 211 and 242 as depicted in Table 25; and/or recognized specifically by the probe sets selected from the group consisting of psids corresponding to SEQ ID NOs: 199, 207, 255 and 354 as depicted in Table 25.

[0019] The present invention encompasses microarrays or gene chips for performing the methods provided herein.

[0020] The present invention encompasses diagnostic/prognostic portfolios containing isolated nucleic acid sequences, their complements, or portions thereof of a combination of genes selected from the group consisting of those encoding mRNA: corresponding to SEQ ID NOs: 36, 53, 73, 211 and 242; and/or corresponding to SEQ ID NOs: 199, 207, 255 and 354; or recognized specifically by the probe sets selected from the group consisting of psids corresponding to SEQ ID NOs: 36, 53, 73, 211 and 242 as depicted in Table 25; and/or recognized specifically by the probe sets selected from the group consisting of psids corresponding to SEQ ID NOs: 199, 207, 255 and 354 as depicted in Table 25 where the combination is sufficient to characterize thyroid carcinoma status or risk of relapse in a biological sample.

### BRIEF DESCRIPTION OF THE DRAWINGS

[0021] FIG. 1 is an ROC curve of the LOOCV of the 4-gene signature in 98 training samples.

[0022] FIG. 2 is an ROC curve of the 5-gene signature in 98 training samples.

[0023] FIG. 3a is an ROC curve of the 4-gene signature in 74 independent validation samples; 3b is an ROC curve of the 5-gene signature in 74 independent validation samples.

[0024] FIG. 4a is an ROC curve of the 4-gene signature that is normalized to the three-thyroid control genes; 4b is an ROC curve of the 5-gene signature that is normalized to the three-thyroid control genes.

[0025] FIG. 5a is an ROC curve of the 4-gene signature with one-round amplification in 47 thyroid samples; 5b is an ROC curve of the 4-gene signature with two-round amplification in 47 thyroid samples; 5c is an ROC curve of the 5-gene signature with one-round amplification in 47 thyroid samples; 5d is an ROC curve of the 5-gene signature with two-round amplification in 47 thyroid samples.

[0026] FIGS. 6a and 6b depict the ROC curves for cross validation with the 83 independent fresh frozen thyroid samples.

[0027] FIGS. 7a and 7b depict the ROC curves for signature validation with the 47 fine needle aspirate (FNA) thyroid samples.

[0028] FIGS. 8a and 8b depict the ROC curves for signature performance in 28 paired fresh frozen and FNA thyroid samples.

### DETAILED DESCRIPTION

[0029] In this study the goal was to identify signatures that can be used in assays such as DNA chip-based assay to differentiate thyroid carcinomas from benign thyroid diseases. 31 primary papillary thyroid tumors, 21 follicular thyroid cancers, 33 follicular adenoma samples, and 13 benign thyroid diseases were analyzed by using the Affymetrix human U133A Gene Chip. Comparison of gene expression profiles between thyroid cancers and benign tissues has enabled us to identify two signatures: a 5-gene signature identified by percentile analysis and manual selection, and a 4-gene signature selected by Linear Discrimination Analysis (LDA) approach. These two signatures have the performance of sensitivity/specificity 92%/70% and 92%/61%, respectively, and have been validated in 74 independent thyroid samples. The results presented herein demonstrate that these candidate signatures facilitate the diagnosis of thyroid cancers with better sensitivity and specificity than currently available diagnostic procedures. These two signatures are suitable for use in testing indeterminate FNA samples.

[0030] By performing gene profiling on 98 representative thyroid benign and tumor samples on Affymetrix U133a chips, we have selected two gene signatures, a 5-gene signature and a 4-gene signature, for thyroid FNA molecular assay. Signatures were selected to achieve the best sensitivity of the assay at a close to 95%. Except for fibronectin and thyroid peroxidase, the other seven genes from the two signatures have not been implicated previously in thyroid tumorogenesis. Both signatures have been validated with an independent 74 thyroid samples, and achieved performance that is equivalent to the one in the 98 training samples. The performances of the two gene signatures are 92% sensitivity and 70%/61% specificity, respectively. When these two signatures are normalized to the specific thyroid control genes the performances are improved relative to the ones of the non-normalized signatures. Furthermore, the signatures performed equivalently with two different target preparations, namely one-round amplification and two-round amplifications. This validation is extremely important for thyroid assays that are FNA samples, which usually contain limited numbers of thyroid cells.

[0031] The mere presence or absence of particular nucleic acid sequences in a tissue sample has only rarely been found to have diagnostic or prognostic value. Information about the expression of various proteins, peptides or mRNA, on the other hand, is increasingly viewed as important. The mere presence of nucleic acid sequences having the potential to express proteins, peptides, or mRNA (such sequences referred to as “genes”) within the genome by itself is not determinative of whether a protein, peptide, or mRNA is expressed in a given cell. Whether or not a given gene capable of expressing proteins, peptides, or mRNA does so and to what extent such expression occurs, if at all, is determined by a variety of complex factors. Irrespective of difficulties in understanding and assessing these factors, assaying gene expression can provide useful information about the occurrence of important events such as tumorogenesis, metastasis, apoptosis, and other clinically relevant phenomena. Relative indications of the degree to which genes are active or inactive can be found in gene expression profiles. The gene expression profiles of this invention are used to provide a diagnosis and treat patients for thyroid cancer.

[0032] Sample preparation requires the collection of patient samples. Patient samples used in the inventive method are those that are suspected of containing diseased cells such as cells taken from a nodule in a fine needle aspirate (FNA) of thyroid tissue. Bulk tissue preparation obtained from a biopsy or a surgical specimen and laser capture microdissection are also suitable for use. Laser Capture Microdissection (LCM) technology is one way to select the cells to be studied, minimizing variability caused by cell type heterogeneity. Consequently, moderate or small changes in gene expression between normal or benign and cancerous cells can be readily detected. Samples can also comprise circulating epithelial cells extracted from peripheral blood. These can be obtained according to a number of methods but the most preferred method is the magnetic separation technique described in U.S. Pat. No. 6,136,182. Once the sample containing the cells of interest has been obtained, RNA is extracted and amplified and a gene expression profile is obtained, preferably via microarray, for genes in the appropriate portfolios.

[0033] The present invention encompasses methods of diagnosing thyroid cancer by obtaining a biological sample from a patient; and measuring the expression levels in the sample of genes from those encoding mRNA: corresponding to SEQ ID NOs: 36, 53, 73, 211 and 242; and/or corresponding to SEQ ID NOs: 199, 207, 255 and 354; or recognized specifically by the probe sets from psids corresponding to SEQ ID NOs: 36, 53, 73, 211 and 242 as depicted in Table 25; and/or recognized specifically by the probe sets from psids corresponding to SEQ ID NOs: 199, 207, 255 and 354 as depicted in Table 25; where the gene expression levels above or below pre-determined cut-off levels are indicative of thyroid cancer.

[0034] The present invention encompasses methods of differentiating between thyroid carcinoma and benign thyroid diseases by obtaining a sample from a patient; and measuring the expression levels in the sample of genes from those encoding mRNA: corresponding to SEQ ID NOs: 36, 53, 73, 211 and 242; and/or corresponding to SEQ ID NOs: 199, 207, 255 and 354; or recognized specifically by the probe sets from psids corresponding to SEQ ID NOs: 36, 53, 73, 211 and 242 as depicted in Table 25; and/or recognized specifically by the probe sets from psids corresponding to SEQ ID NOs: 199, 207, 255 and 354 as depicted in Table 25; where the gene expression levels above or below pre-determined cut-off levels are indicative of thyroid carcinoma.

[0035] The present invention encompasses methods of testing indeterminate thyroid fine needle aspirate (FNA) thyroid nodule samples by: obtaining a sample from a patient; and measuring the expression levels in the sample of genes from those encoding mRNA: corresponding to SEQ ID NOs: 36, 53, 73, 211 and 242; and/or corresponding to SEQ ID NOs: 199, 207, 255 and 354; or

[0036] recognized specifically by the probe sets from psids corresponding to SEQ ID NOs: 36, 53, 73, 211 and 242 as depicted in Table 25; and/or recognized specifically by the probe sets from psids corresponding to SEQ ID NOs: 199, 207, 255 and 354 as depicted in Table 25; where the gene expression levels above or below pre-determined cut-off levels are indicative of thyroid cancer.

[0037] The present invention encompasses methods of determining thyroid cancer patient treatment protocol by: obtaining a biological sample from a thyroid cancer patient; and measuring the expression levels in the sample of genes from those encoding mRNA: corresponding to SEQ ID NOs: 36, 53, 73, 211 and 242; and/or corresponding to SEQ ID NOs: 199, 207, 255 and 354; or recognized specifically by the probe sets from psids corresponding to SEQ ID NOs: 36, 53, 73, 211 and 242 as depicted in Table 25; and/or recognized specifically by the probe sets from psids corresponding to SEQ ID NOs: 199, 207, 255 and 354 as depicted in Table 25; where the gene expression levels above or below pre-determined cut-off levels are sufficiently indicative of cancer to enable a physician to determine the type of surgery and/or therapy recommend to treat the disease.

[0038] The present invention encompasses methods of treating a thyroid cancer patient by obtaining a biological sample from a thyroid cancer patient; and measuring the expression levels in the sample of genes from those encoding mRNA: corresponding to SEQ ID NOs: 36, 53, 73, 211 and 242; and/or corresponding to SEQ ID NOs: 199, 207, 255 and 354; or recognized specifically by the probe sets from psids corresponding to SEQ ID NOs: 36, 53, 73, 211 and 242 as depicted in Table 25; and/or recognized specifically by the probe sets from psids corresponding to SEQ ID NOs: 199, 207, 255 and 354 as depicted in Table 25; where the gene expression levels above or below pre-determined cut-off levels are indicative of cancer; and treating the patient with thyroidectomy if they are cancer positive.

[0039] The SEQ ID NOs in the above methods can be 36, 53, 73, 211 and 242 or 199, 207, 255 and 354, or 45, 215, 65, 29, 190, 199, 207, 255 and 354.

[0040] The invention also encompasses the above methods containing the steps of further measuring the expression level of at least one gene encoding mRNA: corresponding to SEQ ID NOs: 142, 219 and 309; and/or corresponding to SEQ ID NOs: 9, 12 and 18; or recognized specifically by the probe sets from psids corresponding to SEQ ID NOs: 130, 190 and 276 as depicted in Table 25; and/or recognized specifically by the probe sets from psids corresponding to SEQ ID NOs: 9, 12 and 18 as depicted in Table 25. The invention also encompasses the above methods containing the steps of further measuring the expression level of at least one gene constitutively expressed in the sample.

[0041] Cadherin 3, type 1 (SEQ ID NO: 53) is mentioned in US20030194406; US 20050037439; and US 20040137539. Fibronectin (SEQ ID NO: 242) is mentioned in US6436642 and US20030104419. Secretory granule, neuroendocrine protein 1 (SEQ ID NO: 76) is mentioned in US20030232350; and US20040002067. Testican-1 (SEQ ID NO: 36) is mentioned in US20030108963; and US20050037463. Thyroid peroxidase (SEQ ID NO: 211) is mentioned in US6066449, US20030118553; US20030054571; WO9102061; and WO9856953. Chemokine C (C-C) motif ligand 18 (SEQ ID NO: 354) is mentioned in WO2005005601 and US20020114806. Pulmonary surfactant-associated protein B (SEQ ID NO: 355) is mentioned in US20030219760; and US20030232350. K+ channel beta subunit (SEQ ID NO: 207) is mentioned in US20030096782; and US 20020168638. Putative prostate cancer suppressor (SEQ ID NO: 178) is mentioned in WO2005020784. Bone marrow stromal cell antigen 1 (SEQ ID NO: 142) is mentioned in WO2004040014; and WO2005020784. Leucocyte immunoglobulin-like receptor-6b (SEQ ID NO: 219) is mentioned in US20030060614. Bridging integrator 2 (SEQ ID NO: 309) is mentioned in EP1393776; WO02057414; WO 0116158 and US6831063. Cysteine-rich, angiogenic inducer, 61 (SEQ ID NO: 9) is mentioned in WO2004030615; and WO9733995. Selenoprotein P, Plasma 1 (SEQ ID NO: 12) is mentioned in US20040241653 and WO2005015236. Insulin-like growth factor-binding protein 4 (SEQ ID NO: 18) is mentioned in WO2005015236; WO9203469; WO9203152; and EP0546053.

[0042] In this invention, the most preferred method for analyzing the gene expression pattern of a patient in the methods provided herein is through the use of a linear discrimination analysis program. The present invention encompasses a method of generating a posterior probability score to enable diagnosis of thyroid carcinoma patients by: obtaining gene expression data from a statistically significant number of patient biological samples; applying linear discrimination analysis to the data to obtain selected genes; and applying weighted expression levels to the selected genes with discriminate function factor to obtain a prediction model that can be applied as a posterior probability score. Other analytical tools can also be used to answer the same question such as, logistic regression and neural network approaches.

[0043] For instance, the following can be used for linear discriminant analysis:

$${p}_{( CP )} = \frac{{ⅇ}^{{d}_{( CP )} - {d}_{( CN )}}}{1 + {ⅇ}^{{d}_{( CP )} - {d}_{( CN )}}}$$

$${p}_{( CN )} = \frac{1}{1 + {ⅇ}^{{d}_{( CP )} - {d}_{( CN )}}}$$

where,
I_{(psid)}=The log base 2 intensity of the probe set enclosed in parenthesis.
d_{(CP)}=The discriminant function for the cancer positive class
d_{(CN)}=The discriminant function for the cancer negative class
P_{(CP)}=The posterior p-value for the cancer positive class
P_{(CN)}=The posterior p-value for the cancer negative class

[0044] Numerous other well-known methods of pattern recognition are available. The following references provide some examples: Weighted Voting: Golub et al. (1999); Support Vector Machines: Su et al. (2001); and Ramaswamy et al. (2001); K-nearest Neighbors: Ramaswamy (2001); and Correlation Coefficients: van 't Veer et al. (2002).

[0045] Preferably, portfolios are established such that the combination of genes in the portfolio exhibit improved sensitivity and specificity relative to individual genes or randomly selected combinations of genes. In the context of the instant invention, the sensitivity of the portfolio can be reflected in the fold differences exhibited by a gene's expression in the diseased state relative to the normal state. Specificity can be reflected in statistical measurements of the correlation of the signaling of gene expression with the condition of interest. For example, standard deviation can be a used as such a measurement. In considering a group of genes for inclusion in a portfolio, a small standard deviation in expression measurements correlates with greater specificity. Other measurements of variation such as correlation coefficients can also be used in this capacity. The invention also encompasses the above methods where the specificity is at least about 40%, at least about 50% and at least about 60%. The invention also encompasses the above methods where the sensitivity is at least at least about 90% and at least about 92%.

[0046] The invention also encompasses the above methods where the comparison of expression patterns is conducted with pattern recognition methods. One method of the invention involves comparing gene expression profiles for various genes (or portfolios) to ascribe diagnoses. The gene expression profiles of each of the genes comprising the portfolio are fixed in a medium such as a computer readable medium. This can take a number of forms. For example, a table can be established into which the range of signals (e.g., intensity measurements) indicative of disease is input. Actual patient data can then be compared to the values in the table to determine whether the patient samples are normal, benign or diseased. In a more sophisticated embodiment, patterns of the expression signals (e.g., fluorescent intensity) are recorded digitally or graphically. The gene expression patterns from the gene portfolios used in conjunction with patient samples are then compared to the expression patterns.

[0047] Pattern comparison software can then be used to determine whether the patient samples have a pattern indicative of the disease. Of course, these comparisons can also be used to determine whether the patient is not likely to experience the disease. The expression profiles of the samples are then compared to the portfolio of a control cell. If the sample expression patterns are consistent with the expression pattern for cancer then (in the absence of countervailing medical considerations) the patient is treated as one would treat a thyroid cancer patient. If the sample expression patterns are consistent with the expression pattern from the normal/control cell then the patient is diagnosed negative for cancer.

[0048] Preferably, levels of up and down regulation are distinguished based on fold changes of the intensity measurements of hybridized microarray probes. A 1.5 fold difference is preferred for making such distinctions (or a p-value less than 0.05). That is, before a gene is said to be differentially expressed in diseased versus normal cells, the diseased cell is found to yield at least about 1.5 times more, or 1.5 times less intensity than the normal cells. The greater the fold difference, the more preferred is use of the gene as a diagnostic or prognostic tool. Genes selected for the gene expression profiles of this invention have expression levels that result in the generation of a signal that is distinguishable from those of the normal or non-modulated genes by an amount that exceeds background using clinical laboratory instrumentation.

[0049] Statistical values can be used to confidently distinguish modulated from non-modulated genes and noise. Statistical tests find the genes most significantly different between diverse groups of samples. The Student's T-test is an example of a robust statistical test that can be used to find significant differences between two groups. The lower the p-value, the more compelling the evidence that the gene is showing a difference between the different groups. Nevertheless, since microarrays measure more than one gene at a time, tens of thousands of statistical tests may be asked at one time. Because of this, one is unlikely to see small p-values just by chance and adjustments for this using a Sidak correction as well as a randomization/permutation experiment can be made. A p-value less than 0.05 by the T-test is evidence that the gene is significantly different. More compelling evidence is a p-value less then 0.05 after the Sidak correction is factored in. For a large number of samples in each group, a p-value less than 0.05 after the randomization/permutation test is the most compelling evidence of a significant difference.

[0050] The present invention encompasses microarrays or gene chips for performing the methods provided herein. The microarrays can contain isolated nucleic acid sequences, their complements, or portions thereof of a combination of genes from those encoding mRNA: corresponding to SEQ ID NOs: 36, 53, 73, 211 and 242; and/or corresponding to SEQ ID NOs: 199, 207, 255 and 354; or recognized specifically by the probe sets from psids corresponding to SEQ ID NOs: 36, 53, 73, 211 and 242 as depicted in Table 25; and/or recognized specifically by the probe sets from psids corresponding to SEQ ID NOs: 199, 207, 255 and 354 as depicted in Table 25 where the combination is sufficient to characterize thyroid carcinoma or risk of relapse in a biological sample. The microarray preferably measures or characterizes at least about 1.5-fold over- or under-expression, provides a statistically significant p-value over- or under-expression, or a p-value is less than 0.05. Preferably, the microarray contains a cDNA array or an oligonucleotide array and may contain one or more internal control reagents. One preferred internal control reagent is a method of detecting PAX8 gene expression which can be measured using SEQ ID NOs: 409-411.

[0051] Preferably, an oligonucleotide in the array corresponds to the 3′ non-coding region of the gene the expression of which is being measured.

[0052] Another parameter that can be used to select genes that generate a signal that is greater than that of the non-modulated gene or noise is the use of a measurement of absolute signal difference. Preferably, the signal generated by the modulated gene expression is at least 20% different than those of the normal or non-modulated gene (on an absolute basis). It is even more preferred that such genes produce expression patterns that are at least 30% different than those of normal or non-modulated genes.

[0053] Preferred methods for establishing gene expression profiles include determining the amount of RNA that is produced by a gene that can code for a protein or peptide. This is accomplished by reverse transcriptase PCR (RT-PCR), competitive RT-PCR, real time RT-PCR, differential display RT-PCR, Northern Blot analysis and other related tests. While it is possible to conduct these techniques using individual PCR reactions, it is best to amplify complementary DNA (cDNA) or complementary RNA (cRNA) produced from mRNA and analyze it via microarray.

[0054] A number of different array configurations and methods for their production are known to those of skill in the art and are described in U.S. patents such as: U.S. Pat. Nos. 5,445,934; 5,532,128; 5,556,752; 5,242,974; 5,384,261; 5,405,783; 5,412,087; 5,424,186; 5,429,807; 5,436,327; 5,472,672; 5,527,681; 5,529,756; 5,545,531; 5,554,501; 5,561,071; 5,571,639; 5,593,839; 5,599,695; 5,624,711; 5,658,734; and 5,700,637.

[0055] Microarray technology allows for the measurement of the steady-state mRNA level of thousands of genes simultaneously thereby presenting a powerful tool for identifying effects such as the onset, arrest, or modulation of uncontrolled cell proliferation. Two microarray technologies are currently in wide use. The first are cDNA arrays and the second are oligonucleotide arrays. Although differences exist in the construction of these chips, essentially all downstream data analysis and output are the same. The product of these analyses are typically measurements of the intensity of the signal received from a labeled probe used to detect a cDNA sequence from the sample that hybridizes to a nucleic acid sequence at a known location on the microarray. Typically, the intensity of the signal is proportional to the quantity of cDNA, and thus mRNA, expressed in the sample cells. A large number of such techniques are available and useful. Preferred methods for determining gene expression can be found in U.S. Pat. Nos. 6,271,002; 6,218,122; 6,218,114; and 6,004,755.

[0056] Analysis of the expression levels is conducted by comparing such signal intensities. This is best done by generating a ratio matrix of the expression intensities of genes in a test sample versus those in a control sample. For instance, the gene expression intensities from a diseased tissue can be compared with the expression intensities generated from benign or normal tissue of the same type. A ratio of these expression intensities indicates the fold-change in gene expression between the test and control samples.

[0057] Gene expression profiles can also be displayed in a number of ways. The most common method is to arrange raw fluorescence intensities or ratio matrix into a graphical dendogram where columns indicate test samples and rows indicate genes. The data are arranged so genes that have similar expression profiles are proximal to each other. The expression ratio for each gene is visualized as a color. For example, a ratio less than one (indicating down-regulation) may appear in the blue portion of the spectrum while a ratio greater than one (indicating up-regulation) may appear as a color in the red portion of the spectrum. Commercially available computer software programs are available to display such data including “GENESPRING” from Silicon Genetics, Inc. and “DISCOVERY” and “INFER” software from Partek, Inc.

[0058] Modulated genes used in the methods of the invention are described in the Examples. The genes that are differentially expressed are either up regulated or down regulated in patients with thyroid cancer relative to those with benign thyroid diseases. Up regulation and down regulation are relative terms meaning that a detectable difference (beyond the contribution of noise in the system used to measure it) is found in the amount of expression of the genes relative to some baseline. In this case, the baseline is the measured gene expression of a benign disease patient. The genes of interest in the diseased cells are then either up regulated or down regulated relative to the baseline level using the same measurement method. Diseased, in this context, refers to an alteration of the state of a body that interrupts or disturbs, or has the potential to disturb, proper performance of bodily functions as occurs with the uncontrolled proliferation of cells. Someone is diagnosed with a disease when some aspect of that person's genotype or phenotype is consistent with the presence of the disease. However, the act of conducting a diagnosis or prognosis includes the determination of disease/status issues such as determining the likelihood of relapse, type of therapy and therapy monitoring. In therapy monitoring, clinical judgments are made regarding the effect of a given course of therapy by comparing the expression of genes over time to determine whether the gene expression profiles have changed or are changing to patterns more consistent with normal tissue.

[0059] Genes can be grouped so that information obtained about the set of genes in the group provides a sound basis for making a clinically relevant judgment such as a diagnosis, prognosis, or treatment choice. These sets of genes make up the portfolios of the invention. As with most diagnostic markers, it is often desirable to use the fewest number of markers sufficient to make a correct medical judgment. This prevents a delay in treatment pending further analysis as well unproductive use of time and resources.

[0060] One method of establishing gene expression portfolios is through the use of optimization algorithms such as the mean variance algorithm widely used in establishing stock portfolios. This method is described in detail in US patent publication number 20030194734. Essentially, the method calls for the establishment of a set of inputs (stocks in financial applications, expression as measured by intensity here) that will optimize the return (e.g., signal that is generated) one receives for using it while minimizing the variability of the return. Many commercial software programs are available to conduct such operations. “Wagner Associates Mean-Variance Optimization Application,” referred to as “Wagner Software” throughout this specification, is preferred. This software uses functions from the “Wagner Associates Mean-Variance Optimization Library” to determine an efficient frontier and optimal portfolios in the Markowitz sense is preferred. Use of this type of software requires that microarray data be transformed so that it can be treated as an input in the way stock return and risk measurements are used when the software is used for its intended financial analysis purposes.

[0061] The process of selecting a portfolio can also include the application of heuristic rules. Preferably, such rules are formulated based on biology and an understanding of the technology used to produce clinical results. More preferably, they are applied to output from the optimization method. For example, the mean variance method of portfolio selection can be applied to microarray data for a number of genes differentially expressed in subjects with cancer. Output from the method would be an optimized set of genes that could include some genes that are expressed in peripheral blood as well as in diseased tissue. If samples used in the testing method are obtained from peripheral blood and certain genes differentially expressed in instances of cancer could also be differentially expressed in peripheral blood, then a heuristic rule can be applied in which a portfolio is selected from the efficient frontier excluding those that are differentially expressed in peripheral blood. Of course, the rule can be applied prior to the formation of the efficient frontier by, for example, applying the rule during data pre-selection.

[0062] Other heuristic rules can be applied that are not necessarily related to the biology in question. For example, one can apply a rule that only a prescribed percentage of the portfolio can be represented by a particular gene or group of genes. Commercially available software such as the Wagner Software readily accommodates these types of heuristics. This can be useful, for example, when factors other than accuracy and precision (e.g., anticipated licensing fees) have an impact on the desirability of including one or more genes.

[0063] The gene expression profiles of this invention can also be used in conjunction with other non-genetic diagnostic methods useful in cancer diagnosis, prognosis, or treatment monitoring. For example, in some circumstances it is beneficial to combine the diagnostic power of the gene expression based methods described above with data from conventional markers such as serum protein markers (e.g., Cancer Antigen 27.29 (“CA 27.29”)). A range of such markers exists including such analytes as CA 27.29. In one such method, blood is periodically taken from a treated patient and then subjected to an enzyme immunoassay for one of the serum markers described above. When the concentration of the marker suggests the return of tumors or failure of therapy, a sample source amenable to gene expression analysis is taken. Where a suspicious mass exists, a fine needle aspirate (FNA) is taken and gene expression profiles of cells taken from the mass are then analyzed as described above. Alternatively, tissue samples may be taken from areas adjacent to the tissue from which a tumor was previously removed. This approach can be particularly useful when other testing produces ambiguous results.

[0064] The present invention encompasses methods of cross validating a gene expression profile and the profiles thus obtained, for thyroid carcinoma patients by: a. obtaining gene expression data from a statistically significant number of patient biological samples; b. randomizing sample order; c. setting aside data from about 10%-50% of samples; d. computing, for the remaining samples, for factor of interest on all variables and selecting variables that meet a p-value cutoff (p); e. selecting variables that fit a prediction model using a forward search and evaluating the training error until it hits a predetermined error rate; f. testing the prediction model on the left-out 10-50% of samples; g. repeating steps c., -g. with a new set of samples removed; and h. continuing steps c)-g) until 100% of samples have been tested and record classification performance. In this method, preferably, the gene expression data obtained in step h. is represented by genes from those encoding mRNA: corresponding to SEQ ID NOs: 1, 4, 7, 8, 10-11, 13-17, 19-24, 26-27, 29-31, 33-35, 37-38, 40-52, 54-72, 75-82, 84-135, 138-141, 144-151, 153-159, 161-162, 164, 166-173, 176-198, 200-201, 203-206, 208-209, 212-213, 215-218, 220-221, 223, 227-233, 235-241, 243-244, 246-249, 251, 253-254, 256-263, 265-289, 291-293, 295-308, 310-331, 333-341, 343-345, 347-348, 350-353 and 355-363; or recognized specifically by the probe sets from psids in Table 25 corresponding to SEQ ID NOs: 1, 4, 7, 8, 10-11, 13-17, 19-24, 26-27, 29-31, 33-35, 37-38, 40-52, 54-72, 75-82, 84-135, 138-141, 144-151, 153-159, 161-162, 164, 166-173, 176-198, 200-201, 203-206, 208-209, 212-213, 215-218, 220-221, 223, 227-233, 235-241, 243-244, 246-249, 251, 253-254, 256-263, 265-289, 291-293, 295-308, 310-331, 333-341, 343-345, 347-348, 350-353 and 355-363.

[0065] The present invention encompasses methods of independently validating a gene expression profile and the profiles thus obtained, for thyroid cancer patients by obtaining gene expression data from a statistically significant number of patient biological samples; normalizing the source variabilities in the gene expression data; computing for factor of interest on all variables that were selected previously; and testing the prediction model on the sample and record classification performance. In this method, preferably, the gene expression data obtained in step d. is represented by genes from those encoding mRNA: corresponding to SEQ ID NOs: 1, 4, 7, 8, 10-11, 13-17, 19-24, 26-27, 29-31, 33-35, 37-38, 40-52, 54-72, 75-82, 84-135, 138-141, 144-151, 153-159, 161-162, 164, 166-173, 176-198, 200-201, 203-206, 208-209, 212-213, 215-218, 220-221, 223, 227-233, 235-241, 243-244, 246-249, 251, 253-254, 256-263, 265-289, 291-293, 295-308, 310-331, 333-341, 343-345, 347-348, 350-353 and 355-363; or recognized specifically by the probe sets from psids in Table 25 corresponding to SEQ ID NOs: 1, 4, 7, 8, 10-11, 13-17, 19-24, 26-27, 29-31, 33-35, 37-38, 40-52, 54-72, 75-82, 84-135, 138-141, 144-151, 153-159, 161-162, 164, 166-173, 176-198, 200-201, 203-206, 208-209, 212-213, 215-218, 220-221, 223, 227-233, 235-241, 243-244, 246-249, 251, 253-254, 256-263, 265-289, 291-293, 295-308, 310-331, 333-341, 343-345, 347-348, 350-353 and 355-363.

[0066] The present invention encompasses methods of generating a posterior probability to enable diagnosis of thyroid carcinoma patients by obtaining gene expression data from a statistically significant number of patient biological samples; applying linear discrimination analysis to the data to obtain selected genes; applying weighted expression levels to the selected genes with discriminate function factor to obtain a prediction model that can be applied as a posterior probability score. For instance, the following can be used for Linear Discriminant Analysis:

$${p}_{( CP )} = \frac{{ⅇ}^{{d}_{( CP )} - {d}_{( CN )}}}{1 + {ⅇ}^{{d}_{( CP )} - {d}_{( CN )}}}$$

$${p}_{( CN )} = \frac{1}{1 + {ⅇ}^{{d}_{( CP )} - {d}_{( CN )}}}$$

where,
I_{(psid)}=The log base 2 intensity of the probe set enclosed in parenthesis.
d_{(CP)}=The discriminant function for the cancer positive class
d_{(CN)}=The discriminant function for the cancer negative class
P_{(CP)}=The posterior p-value for the cancer positive class
P_{(CN)}=The posterior p-value for the cancer negative class

[0067] The present invention encompasses methods of generating a thyroid carcinoma diagnostic patient report and reports obtained thereby, by obtaining a biological sample from the patient; measuring gene expression of the sample; applying a posterior probability score thereto; and using the results obtained thereby to generate the report. The report can also contain an assessment of patient outcome and/or probability of risk relative to the patient population.

[0068] The present invention encompasses compositions containing at least one probe set from: SEQ ID NOs: 36, 53, 73, 211 and 242; and/or SEQ ID NOs: 199, 207, 255 and 354; or the psids corresponding to SEQ ID NOs: 36, 53, 73, 211 and 242; and/or SEQ ID NOs: 199, 207, 255 and 354 as depicted in Table 25.

[0069] The present invention encompasses kits for conducting an assay to determine thyroid carcinoma diagnosis in a biological sample containing: materials for detecting isolated nucleic acid sequences, their complements, or portions thereof of a combination of genes from those encoding mRNA: corresponding to SEQ ID NOs: 36, 53, 73, 211 and 242; and/or corresponding to SEQ ID NOs: 199, 207, 255 and 354; or recognized specifically by the probe sets from psids corresponding to SEQ ID NOs: 36, 53, 73, 211 and 242 as depicted in Table 25; and/or recognized specifically by the probe sets from psids corresponding to SEQ ID NOs: 199, 207, 255 and 354 as depicted in Table 25. The SEQ ID NOs. can be 36, 53, 73, 211 and 242, 199, 207, 255 and 354 and 45, 215, 65, 29, 190, 199, 207, 255 and 354.

[0070] Kits made according to the invention include formatted assays for determining the gene expression profiles. These can include all or some of the materials needed to conduct the assays such as reagents and instructions and a medium through which nucleic acid sequences, their complements, or portions thereof are assayed.

[0071] Articles of this invention include representations of the gene expression profiles useful for treating, diagnosing, prognosticating, and otherwise assessing diseases. These profile representations are reduced to a medium that can be automatically read by a machine such as computer readable media (magnetic, optical, and the like). The articles can also include instructions for assessing the gene expression profiles in such media. For example, the articles may comprise a CD ROM having computer instructions for comparing gene expression profiles of the portfolios of genes described above. The articles may also have gene expression profiles digitally recorded therein so that they may be compared with gene expression data from patient samples. Alternatively, the profiles can be recorded in different representational format. A graphical recordation is one such format. Clustering algorithms such as those incorporated in “DISCOVERY” and “INFER” software from Partek, Inc. mentioned above can best assist in the visualization of such data.

[0072] Different types of articles of manufacture according to the invention are media or formatted assays used to reveal gene expression profiles. These can comprise, for example, microarrays in which sequence complements or probes are affixed to a matrix to which the sequences indicative of the genes of interest combine creating a readable determinant of their presence. Alternatively, articles according to the invention can be fashioned into reagent kits for conducting hybridization, amplification, and signal generation indicative of the level of expression of the genes of interest for detecting cancer.

[0073] The present invention encompasses articles for assessing thyroid carcinoma status containing: materials for detecting isolated nucleic acid sequences, their complements, or portions thereof of a combination of genes from those encoding mRNA: corresponding to SEQ ID NOs: 36, 53, 73, 211 and 242; and/or corresponding to SEQ ID NOs: 199, 207, 255 and 354; or recognized specifically by the probe sets from psids corresponding to SEQ ID NOs: 36, 53, 73, 211 and 242 as depicted in Table 25; and/or recognized specifically by the probe sets from psids corresponding to SEQ ID NOs: 199, 207, 255 and 354 as depicted in Table 25. The SEQ ID NOs. can be 36, 53, 73, 211 and 242; 199, 207, 255 and 354; or 45, 215, 65, 29, 190, 199, 207, 255 and 354.

[0074] The present invention encompasses diagnostic/prognostic portfolios containing isolated nucleic acid sequences, their complements, or portions thereof of a combination of genes from those encoding mRNA: corresponding to SEQ ID NOs: 36, 53, 73, 211 and 242; and/or corresponding to SEQ ID NOs: 199, 207, 255 and 354; or recognized specifically by the probe sets from psids corresponding to SEQ ID NOs: 36, 53, 73, 211 and 242 as depicted in Table 25; and/or recognized specifically by the probe sets from psids corresponding to SEQ ID NOs: 199, 207, 255 and 354 as depicted in Table 25 where the combination is sufficient to characterize thyroid carcinoma status or risk of relapse in a biological sample. Preferably, the portfolio measures or characterizes at least about 1.5-fold over- or under-expression or provides a statistically significant p-value over- or under-expression. Preferably, the p-value is less than 0.05.

[0075] The following examples are provided to illustrate but not limit the claimed invention. All references cited herein are hereby incorporated by reference herein.

### EXAMPLE 1

### Materials and Methods

Tissue samples

[0076] Fresh frozen thyroid benign diseases, follicular adenoma, follicular carcinoma, and papillary carcinoma samples were obtained from different commercial vendors including Genomics Collaborative, Inc. (Cambridge, Mass.), Asterand (Detroit, Mich.), and Proteogenex (Los Angeles, Calif.). All samples were collected according to an Institutional Review Board approval protocol. Patients demographic and pathology information were also collected. The histopathological features of each sample were reviewed to confirm diagnosis, estimate sample preservation and tumor content.

RNA isolation

[0077] Standard TriZol protocol was used for all the RNA isolations. Tissue was homogenized in TriZol reagent (Invitrogen, Carlsbad, Calif.). Total RNA was isolated from TriZol and precipitated at −20° C. with isopropyl alcohol. RNA pellets were washed with 75% ethanol, dissolved in water and stored at −80° C. until use. RNA integrity was examined with Agilent 2100 Bioanalyzer RNA 6000 NanoAssay (Agilent Technologies, Palo Alto, Calif.).

Linear Discrimination Analysis

[0078] Linear Discriminant Analysis was performed using these steps: calculation of a common (pooled) covariance matrix and within-group means; calculation of the set of linear discriminant functions from the common covariance and the within-group means; and classification using the linear discriminant functions.

[0079] Plugging the chip intensity readings for each probe into the following equation can be used to derive the posterior probability of an unknown thyroid sample as either cancer positive or negative. For example, if a thyroid sample is tested with the assay and gives a p_{(CP)}>0.5 this sample will be classified as thyroid cancer.

For the 4 gene signature:
d_{(CP)}=−50.9964+0.220424(I₍₃₂₁₂₈_{_{—}}ₐₜ₎)+1.520185(I₍₂₀₉₈₁₀_{_{—}}ₐₜ₎)+3.09431(I₍₂₁₀₀₇₈_{_{—}}ₛ_{_{—}}ₐₜ₎)+6.11283(I₍₂₁₃₄₂₃_{_{—}}ₓ_{_{—}}ₐₜ₎)
d_{(CN)}=−46.7445+0.374751(I₍₃₂₁₂₈_{_{—}}ₐₜ₎)+1.010852(I₍₂₀₉₈₁₀_{_{—}}ₐₜ₎)+3.645515(I₍₂₁₀₀₇₈_{_{—}}ₛ_{_{—}}ₐₜ₎)+5.337296(I₍₂₁₃₄₂₃_{_{—}}ₓ_{_{—}}ₐₜ₎)
For the 5 gene signature:
d_{(CP)}=−135.931+4.737838(I₍₂₀₂₃₆₃_{_{—}}ₐₜ₎)−1.23763(I₍₂₀₃₂₅₆_{_{—}}ₐₜ₎)+1984148(I₍₂₀₃₈₈₉_{_{—}}ₐₜ₎)+6.638082(l₍₂₁₀₃₄₂_{_{—}}ₛ_{_{—}}ₐₜ)+10.7704(I₍₂₁₂₄₆₄_{_{—}}ₛ_{_{—}}ₐₜ₎)
d_{(CN)}=−128.978+4.610498(I₍₂₀₂₃₆₃_{_{—}}ₐₜ₎)−1.28685(I₍₂₀₃₂₅₆_{_{—}}ₐₜ₎)+1.656772 (I(203889_{_{—}}ₐₜ₎)+6.859133(l₍₂₁₀₃₄₂_{_{—}}ₛ_{_{—}}ₐₜ)+10.24482 (I₍₂₁₂₄₆₄_{_{—}}ₛ_{_{—}}ₐₜ₎)

$${p}_{( CP )} = \frac{{ⅇ}^{{d}_{( CP )} - {d}_{( CN )}}}{1 + {ⅇ}^{{d}_{( CP )} - {d}_{( CN )}}}$$

$${p}_{( CN )} = \frac{1}{1 + {ⅇ}^{{d}_{( CP )} - {d}_{( CN )}}}$$

where,
I_{(psid)}=The log base 2 intensity of the probe set enclosed in parenthesis.
d_{(CP)}=The discriminant function for the cancer positive class
d_{(CN)}=The discriminant function for the cancer negative class
P_{(CP)}=The posterior p-value for the cancer positive class
P_{(CN)}=The posterior p-value for the cancer negative class
Two-Round aRNA Amplification

[0080] aRNA was amplified from 10 ng total RNA using the RiboBeast 2-Round Aminoallyl-aRNA Amplification kit (Epicentre, WI), a T7 based RNA linear amplification protocol, with some modifications. Total RNA was reverse transcribed using an oligo(dT) primer containing a T7 RNA polymerase promoter sequence and Superscript III RT. The second-strand synthesis was carried out using Bst DNA polymerase. An extra step of incubation with an exonuclease mix of Exo I and Exo VII was performed to reduce background. The double-stranded cDNA served as the template for T7-mediated linear amplification by in vitro transcription. For the second round of amplification, instead of using the RiboBeast reagents, the ENZO BioArray HighYield RNA Transcript Labeling kit (Affymetrix, CA) was used in place of the in vitro transcription step of Aminoallyl-aRNA. The aRNA was quantified by Agilent Nano Chip technology.

### EXAMPLE 2

### Microarray Analysis

[0081] Labeled cRNA was prepared and hybridized with the high-density oligonucleotide array Hu133A Gene Chip (Affymetrix, Santa Clara, Calif.) containing a total of 22,000 probe sets. Hybridization was performed according to a standard protocol provided by the manufacturer. Arrays were scanned using Affymetrix protocols and scanners. For subsequent analysis, each probe set was considered as an independent gene. Expression values for each gene were calculated by using Affymetrix Gene Chip analysis software MAS 5.0. All chips met the following quality control standards: the percentage of “presence” call, the scaling factor, the background level, and the noise level have to be within the range of mean plus or minus 3 standard deviation. All chips used for subsequent analysis have passed these quality control criteria. Sample collection for signature selection and independent validation is summarized in Table 1.

TABLE 1
Sample collection for signature training and validation

| | |
|---|---|
| Category | Number of Samples |

Training Sample Set

| | |
|---|---|
| Follicular Adenoma (FA) | 33 |
| Follicular Carcinoma (FC) | 21 |
| Benign Diseases (BN) | 13 |
| Papillary Carcinoma (PC) | 31 |

Validation Sample Set

| | |
|---|---|
| Follicular Adenoma (FA) | 38 |
| Follicular Carcinoma (FC) | 5 |
| Follicular Variant of Papillary | 11 |
| Carcinoma (FVPTC) | |
| Papillary Carcinoma (PC) | 20 |

### EXAMPLE 3

### Results Signature Identification

A. Gene Selection

[0082] A total of 98 samples including 31 primary papillary thyroid tumors, 21 follicular thyroid cancers, 33 follicular adenoma, and 13 benign thyroid tissues were analyzed by using Affymetrix human U133A gene chips. Five gene selection criteria were applied to the entire data set to obtain a limited number of genes for subsequent gene marker or signature identification:

[0083] 1. Genes with at least one “Present Call” in this sample set were considered.

[0084] 2. Genes with more than one “Present Call” in 12 PBL samples were excluded.

[0085] 3. Only genes with chip intensity larger than 200 in all samples were selected.

[0086] 4. Using genes that passed the above three criteria, we performed a variety of analyses, as listed in Table 2, to identify genes that are either up-regulated or down-regulated in thyroid tumors.

[0087] 5. Finally, genes with expression change greater than 1.4-fold were selected.

TABLE 2
Summary of different types of percentile analyses

| | Type of Percentile Analysis |
|---|---|
| 1 | 20% FC vs 100% Benign |
| 2 | 30% FC vs 90% Benign |
| 3 | 30% PC vs 90% Benign |
| 4 | 70% FC vs 50% Benign |
| 5 | 70% PC vs 50% Benign |
| 6 | 90% Benign vs 30% FC |
| 7 | 90% Benign vs 30% PC |

[0088] The final number of selected genes for signature identification is 322, described in Table 25, SEQ ID NOs: 1, 4, 7, 8, 10-11, 13-17, 19-24, 26-27, 29-31, 33-35, 37-38, 40-52, 54-72, 75-82, 84-135, 138-141, 144-151, 153-159, 161-162, 164, 166-173, 176-198, 200-201, 203-206, 208-209, 212-213, 215-218, 220-221, 223, 227-233, 235-241, 243-244, 246-249, 251, 253-254, 256-263, 265-289, 291-293, 295-308, 310-331, 333-341, 343-345, 347-348, 350-353 and 335-363. The data obtained from the 322 selected genes are provided in Table 3 and summarized in Table 4.

TABLE 3
3a

| SEQ ID NO: | 800TT | 801TT | 802TT | 804TT | 805TT | 806TT | 807TT | 818TT | 819TT |
|---|---|---|---|---|---|---|---|---|---|
| 354 | 10235.3 | 163.8 | 12.2 | 99.1 | 111.6 | 2506.3 | 1780.7 | 29.3 | 4.1 |
| 355 | 508.5 | 150.8 | 31.5 | 83.8 | 63.1 | 457.5 | 189.9 | 48.2 | 45.3 |
| 356 | 82.7 | 754 | 707.3 | 477.3 | 1120.7 | 827.5 | 246.3 | 1068.3 | 960.1 |
| 357 | 834 | 758.9 | 718 | 249.4 | 883.6 | 554.5 | 377.5 | 616.1 | 706.9 |
| 358 | 2490.4 | 593.3 | 565.5 | 540.3 | 1132.7 | 750.4 | 803.7 | 377.4 | 534.6 |
| 359 | 533.5 | 342 | 412 | 409.4 | 413.3 | 396.5 | 309.5 | 352.8 | 317.7 |
| 362 | 136.4 | 550 | 399.6 | 653.8 | 573.4 | 322.4 | 539.5 | 317.5 | 324.9 |
| 360 | 476.2 | 324.5 | 352.5 | 348.2 | 473.3 | 342.9 | 170.3 | 190.1 | 279.4 |
| 361 | 196.4 | 995.8 | 839.3 | 382.6 | 926.9 | 480.8 | 305.3 | 913.9 | 1123.4 |
| 363 | 642.7 | 392.9 | 410.2 | 742.3 | 447.2 | 504.9 | 457.6 | 397 | 490.3 |
| 1 | 57.5 | 694.1 | 410.9 | 413.8 | 950.3 | 946.6 | 351.2 | 317.7 | 346.4 |
| 2 | 854 | 3127.2 | 2912.3 | 675.3 | 4484 | 3866 | 950.5 | 2514.3 | 2438.1 |
| 7 | 6.6 | 584 | 1380.1 | 315.4 | 543 | 393.6 | 303.9 | 713.9 | 821.6 |
| 8 | 6606.3 | 941.2 | 1104.5 | 736.7 | 749.7 | 1740.5 | 1083.6 | 423.7 | 583.3 |
| 9 | 1852.9 | 10149.7 | 6856.2 | 2912.1 | 6808.7 | 1233.4 | 3010.6 | 3890.5 | 2225.4 |
| 10 | 213.9 | 56.5 | 66.8 | 70.8 | 121.8 | 102.5 | 426.1 | 58.3 | 149.9 |
| 11 | 463.3 | 163.4 | 131.5 | 187.4 | 350.7 | 210.3 | 129.1 | 340.2 | 336.3 |
| 13 | 286.2 | 180.9 | 111.8 | 233.1 | 197.5 | 335.1 | 173.8 | 70.7 | 108.3 |
| 14 | 1590.2 | 437.8 | 323.5 | 558.1 | 897.5 | 1161.3 | 642.8 | 105.9 | 170.6 |
| 15 | 9293.6 | 467.4 | 332.9 | 823.3 | 3718.3 | 204 | 959.7 | 506.8 | 670.5 |
| 16 | 180 | 1093.1 | 911.1 | 674.5 | 960.2 | 1600.8 | 467 | 1244.5 | 995.6 |
| 17 | 850.8 | 1221.7 | 2320.1 | 687.9 | 1614.9 | 1605.7 | 404.6 | 1911.4 | 2114 |
| 19 | 411.1 | 1415.6 | 184.1 | 723.5 | 1035.5 | 370.5 | 548.9 | 147 | 192.6 |
| 20 | 733.9 | 1.1 | 1.1 | 74.5 | 256.4 | 1.1 | 326.7 | 1.1 | 1.2 |
| 21 | 72.3 | 200.7 | 12.9 | 81.5 | 88.3 | 242.5 | 67 | 11.5 | 37.4 |
| 22 | 3094.8 | 9706.3 | 7329.5 | 3225.3 | 6075.3 | 6859.5 | 2406.5 | 6706.8 | 8884.7 |
| 23 | 4749.1 | 837.4 | 1.1 | 835.6 | 2674.6 | 364.3 | 1127.5 | 1.1 | 31.7 |
| 24 | 965.6 | 221 | 39.2 | 361.9 | 738.2 | 167.3 | 169.5 | 71.9 | 121.6 |
| 26 | 7416.9 | 7158.3 | 127.4 | 6838.8 | 8238 | 2252.3 | 5033.6 | 65.1 | 119.9 |
| 27 | 58.1 | 722.5 | 759 | 815.4 | 651.8 | 689.9 | 359.8 | 573 | 381.9 |
| 29 | 215.3 | 111.1 | 55.4 | 103.7 | 90.2 | 70.5 | 65.9 | 199.3 | 105.7 |
| 30 | 5508.4 | 259.4 | 11.7 | 410.1 | 853.5 | 143.9 | 596.3 | 20.7 | 45.8 |
| 31 | 141.5 | 311.1 | 66.8 | 198.7 | 183.8 | 290.6 | 464.1 | 50.5 | 108.6 |
| 33 | 20935.4 | 341.8 | 144.8 | 828.3 | 7608.5 | 425 | 359.1 | 89.7 | 315.9 |
| 34 | 82.5 | 4387.6 | 4002.6 | 2634.3 | 4784.6 | 4798 | 2420.6 | 3104.2 | 3558 |
| 35 | 289.7 | 142.4 | 32.9 | 436.5 | 220.8 | 143.9 | 838.9 | 24.4 | 27.4 |
| 36 | 760.5 | 205.8 | 124 | 156.6 | 338.1 | 167.8 | 148.6 | 42.9 | 140.8 |
| 37 | 339.4 | 237.6 | 117.2 | 340.6 | 200.9 | 294.7 | 332.7 | 183.3 | 276.3 |
| 38 | 15634.5 | 361.2 | 546.7 | 505.1 | 4617.1 | 382.4 | 256.9 | 914.7 | 676.5 |
| 40 | 622.8 | 479.8 | 437.7 | 682.8 | 423.9 | 523.7 | 477.9 | 481.4 | 742.7 |
| 41 | 217.2 | 359.7 | 234.4 | 221.2 | 757.4 | 528.7 | 139.2 | 226.1 | 164.4 |
| 42 | 219.8 | 238.2 | 203.5 | 163.5 | 270.5 | 212.1 | 176.6 | 169.7 | 210.4 |
| 43 | 234.7 | 301 | 366.1 | 430.4 | 277 | 390.7 | 298.8 | 366.6 | 431.1 |
| 44 | 1194.4 | 428.6 | 352.7 | 678.6 | 1038.4 | 590.6 | 502.4 | 312.5 | 412.6 |
| 45 | 93.2 | 348.4 | 537.2 | 498.2 | 362.4 | 526.8 | 286.3 | 593.7 | 721.8 |
| 46 | 353.4 | 362.7 | 228.1 | 486.3 | 390 | 348.8 | 264.3 | 223.9 | 308.2 |
| 47 | 1440 | 122.7 | 195.5 | 267.7 | 384.4 | 279.8 | 279.8 | 186 | 120.1 |
| 48 | 199.4 | 203.4 | 16.7 | 1371.4 | 795.6 | 261.9 | 2274.7 | 36.6 | 21 |
| 49 | 195.9 | 337.7 | 268 | 285.8 | 341.3 | 420.2 | 392.8 | 175.7 | 207.1 |
| 50 | 8413 | 277.9 | 72.9 | 481 | 1790.1 | 240.3 | 276.3 | 19.6 | 144.4 |
| 51 | 548.4 | 42 | 29 | 436.1 | 66.9 | 35.2 | 265.4 | 38.8 | 35.4 |
| 52 | 189.3 | 199.3 | 189.3 | 144.9 | 217.9 | 179.8 | 189.7 | 265.6 | 263.1 |
| 53 | 90.2 | 79.3 | 46.2 | 51 | 36.3 | 81.2 | 109.4 | 83.5 | 33.9 |
| 54 | 879.2 | 383 | 1133.4 | 796.7 | 378.8 | 853 | 508.4 | 1350.7 | 462.2 |
| 55 | 69.1 | 130.4 | 81.7 | 126.9 | 65.7 | 123.7 | 96.6 | 86.1 | 118.9 |
| 56 | 29.9 | 53.2 | 83.6 | 82.1 | 125.5 | 80.4 | 57 | 64.5 | 59.6 |
| 57 | 5589.3 | 468.9 | 208.8 | 519 | 338.3 | 2738.1 | 2814.6 | 95.3 | 120 |
| 58 | 25483 | 492.1 | 294.6 | 702.4 | 495.2 | 2804.2 | 3544.8 | 95.7 | 164.7 |
| 59 | 57.6 | 1695.3 | 1278.9 | 884.1 | 1841.6 | 2339.6 | 560.2 | 1800.2 | 2204 |
| 60 | 308 | 154.2 | 148.1 | 188 | 151.4 | 261 | 115.3 | 120.2 | 177.2 |
| 61 | 193.7 | 168.2 | 134.2 | 228 | 153.6 | 138.7 | 132.1 | 83.1 | 176.1 |
| 62 | 119.4 | 478.9 | 203.5 | 1627.2 | 1442.2 | 1810.1 | 903.6 | 75 | 2303.9 |
| 63 | 98.7 | 380.9 | 470 | 197.8 | 346.6 | 224.8 | 242.2 | 297.5 | 192 |
| 64 | 143.1 | 133.4 | 210.8 | 393.3 | 197.5 | 194.5 | 165.5 | 154.4 | 209.9 |
| 65 | 328.5 | 124 | 64.1 | 172.8 | 348.1 | 151.2 | 192.8 | 101.1 | 127.9 |
| 66 | 249.1 | 732 | 1332.3 | 450.2 | 923.7 | 721.7 | 524.1 | 1163.3 | 1056 |
| 67 | 293.1 | 31554.3 | 31050.5 | 34557.4 | 35093.9 | 33778.1 | 21708.9 | 33200.2 | 37492 |
| 68 | 63 | 2405 | 2694.9 | 2196.1 | 5092.2 | 382 | 1972.5 | 2314.2 | 2245.9 |
| 69 | 756.5 | 5955.8 | 7077.6 | 5234.2 | 6301.1 | 1133.5 | 5870 | 6218.4 | 8519.4 |
| 70 | 424.6 | 2064.6 | 2173.1 | 4141.4 | 1212.7 | 1829.6 | 2418 | 1388.8 | 1591.4 |
| 71 | 499.3 | 545.4 | 159.2 | 507.5 | 2187.3 | 258.8 | 298.2 | 106.5 | 73.5 |
| 72 | 431.6 | 355.2 | 472.7 | 512.9 | 768.2 | 712.7 | 665.7 | 1451.1 | 410 |
| 73 | 272.6 | 264.5 | 266.7 | 235 | 473.2 | 341 | 218 | 433.5 | 361.9 |
| 75 | 120.4 | 364.8 | 176 | 279 | 491.9 | 225.9 | 244.3 | 377.5 | 440.7 |
| 76 | 153.3 | 176.5 | 46 | 143.8 | 95.5 | 498 | 182.1 | 2 | 34.8 |
| 77 | 102.1 | 3322.2 | 3704.4 | 3549.3 | 7422.7 | 3279.7 | 2337.5 | 2786.8 | 6811 |
| 78 | 297.4 | 973.1 | 1410.8 | 487 | 1074.9 | 411.4 | 315 | 1025.7 | 834.1 |
| 79 | 126.7 | 120.4 | 132.9 | 181.3 | 166.4 | 87.6 | 155.4 | 114.9 | 113.9 |
| 80 | 153.8 | 328.9 | 160.6 | 571.7 | 267 | 307.1 | 430.9 | 345.1 | 451.1 |
| 81 | 179.7 | 181.8 | 101.5 | 996.9 | 161.1 | 619.2 | 1156.4 | 73 | 105.5 |
| 82 | 54.9 | 362.8 | 385.4 | 367 | 264.5 | 251.3 | 241.3 | 414.2 | 220 |
| 84 | 101.2 | 291.6 | 129.7 | 162.2 | 330.9 | 286.7 | 196.3 | 75.3 | 77.5 |
| 85 | 558.7 | 171.1 | 121.8 | 116.1 | 116.9 | 188.5 | 368.6 | 191 | 161.4 |
| 86 | 100.5 | 90.5 | 67.6 | 100.4 | 71.3 | 78.5 | 104.6 | 80.5 | 101.4 |
| 87 | 144.9 | 375.2 | 299.1 | 190 | 267 | 227.3 | 94.1 | 70.7 | 488.1 |
| 88 | 136.1 | 4022.9 | 4905.4 | 2121.4 | 4345.4 | 4155.7 | 1621.6 | 5239.4 | 7618.2 |
| 89 | 361.1 | 158.9 | 159.8 | 335 | 218.5 | 244.6 | 224.8 | 136.2 | 163 |
| 90 | 1105.6 | 113.4 | 92.7 | 212.6 | 301.1 | 131.7 | 229.6 | 81.7 | 75.7 |
| 91 | 41283.8 | 405.2 | 83.4 | 373.4 | 101.5 | 3129.9 | 2037.3 | 10.9 | 73.8 |
| 92 | 125.5 | 4171.4 | 3562.5 | 2666.8 | 2820.2 | 7133.6 | 1929 | 11013.3 | 6783.5 |
| 93 | 102.9 | 336.1 | 636.6 | 108.4 | 214.1 | 218.9 | 125.8 | 330.1 | 222.8 |
| 94 | 173.3 | 927 | 600.9 | 384.5 | 1060.6 | 985.2 | 285.3 | 819.3 | 759 |
| 95 | 43.6 | 796 | 225.2 | 699.2 | 229.7 | 1129 | 264.2 | 589.6 | 347.5 |
| 96 | 166.4 | 173.4 | 234 | 108.8 | 198.5 | 171.6 | 90.4 | 154.2 | 139.9 |
| 97 | 28.3 | 196.3 | 256.1 | 110.4 | 302.3 | 307.3 | 112.4 | 520.9 | 415.1 |
| 98 | 33 | 47.3 | 44.5 | 6.1 | 33.2 | 34.4 | 62.9 | 9.7 | 34 |
| 99 | 315.9 | 219.6 | 221.2 | 281.5 | 254.6 | 306.8 | 218.9 | 200 | 240.6 |
| 100 | 40.3 | 12275.1 | 7465.8 | 4158.8 | 5537.2 | 19961.1 | 1057.9 | 1835.4 | 28160.9 |
| 101 | 169.6 | 185 | 264.2 | 312.3 | 225.5 | 277.8 | 165.2 | 258.7 | 276.2 |
| 102 | 208.7 | 160.9 | 193 | 308.2 | 155.3 | 201.8 | 154.2 | 171.3 | 189.5 |
| 103 | 402 | 302.9 | 300.1 | 382.9 | 342.4 | 374.1 | 315.3 | 292.4 | 280.2 |
| 104 | 25.2 | 569 | 354.3 | 402.2 | 554.5 | 1086.3 | 407.5 | 469.3 | 840.9 |
| 105 | 46.4 | 550.9 | 418 | 437.1 | 724.9 | 1141 | 481.6 | 596 | 1001.3 |
| 106 | 15.2 | 622.8 | 398.8 | 419.8 | 577.5 | 1074.2 | 377.8 | 444.5 | 794.4 |
| 107 | 6337.1 | 255.7 | 210 | 448.7 | 353.8 | 639.6 | 315 | 91.3 | 155.9 |
| 108 | 167.9 | 316.2 | 436.9 | 315 | 429.5 | 269.2 | 221.7 | 417.3 | 467 |
| 109 | 64.8 | 1110.3 | 875.6 | 160.6 | 318.4 | 942.9 | 215.8 | 1481.1 | 53.8 |
| 110 | 1.1 | 1261.5 | 1589.1 | 263.4 | 923.8 | 4084.9 | 415 | 4417 | 6.3 |
| 111 | 33.1 | 1767.8 | 1964.9 | 1872.4 | 427.3 | 1690.7 | 1292.2 | 749.5 | 1008.9 |
| 112 | 1.3 | 407.2 | 104.1 | 401.9 | 271.4 | 454.9 | 209.1 | 219.9 | 30.2 |
| 113 | 139 | 51.3 | 189.9 | 275.6 | 197.3 | 169.2 | 225.7 | 104.1 | 185.9 |
| 114 | 268.1 | 679 | 853.3 | 378.5 | 772.9 | 883.3 | 311 | 353.1 | 443.1 |
| 115 | 357.8 | 569.5 | 376 | 383.7 | 574.8 | 380.6 | 337.8 | 221.5 | 323.5 |
| 116 | 291.2 | 223 | 163.2 | 334.1 | 242.5 | 288.6 | 199.1 | 177.2 | 195.2 |
| 117 | 289.8 | 5414.4 | 4654.4 | 1394.2 | 3310.6 | 2815.7 | 721.7 | 3557.6 | 5696.6 |
| 118 | 92 | 533.6 | 90.4 | 527.7 | 275.1 | 665.7 | 306.8 | 60.3 | 99.6 |
| 119 | 114.7 | 226.3 | 336.7 | 194.9 | 102.7 | 168.3 | 397.7 | 81.7 | 65 |
| 120 | 78.6 | 116.4 | 118.2 | 137 | 338.5 | 139 | 164.3 | 51.8 | 73.3 |
| 121 | 161.2 | 788.8 | 997.1 | 260.6 | 745.8 | 1450.3 | 199.5 | 403.7 | 483.3 |
| 122 | 90.3 | 263.5 | 89.9 | 186.6 | 106.4 | 226.4 | 124.7 | 51.1 | 205 |
| 123 | 172.4 | 136.9 | 175 | 193.8 | 162.9 | 133.6 | 111.5 | 92.3 | 143.1 |
| 124 | 182.9 | 130.4 | 129.2 | 229.5 | 137.2 | 159 | 182.4 | 106.9 | 127 |
| 125 | 771.9 | 885.8 | 846.9 | 1521.7 | 915.3 | 963.4 | 856.9 | 836.5 | 775.4 |
| 126 | 25.4 | 1583.4 | 1549.9 | 728 | 2100.4 | 1526.4 | 558.8 | 1490.2 | 1266 |
| 127 | 101.3 | 121.8 | 97.6 | 163.5 | 99.6 | 101.1 | 101.1 | 74.1 | 160.2 |
| 128 | 346 | 234 | 238.5 | 469 | 239.1 | 325 | 198.4 | 245.9 | 311.8 |
| 129 | 4494.1 | 248.8 | 234 | 274.6 | 301.2 | 383.9 | 270 | 72.7 | 148.1 |
| 130 | 117.9 | 100.2 | 138.4 | 121.9 | 98.9 | 104 | 97.7 | 33 | 120.6 |
| 131 | 95.6 | 67.8 | 71.9 | 133.7 | 83.3 | 81.3 | 92 | 127.2 | 160.1 |
| 132 | 232 | 188.4 | 200.5 | 251 | 174 | 266.8 | 171.5 | 186.5 | 257.7 |
| 133 | 31.9 | 91.9 | 61.8 | 130.6 | 56.7 | 175.5 | 98.6 | 96.9 | 108.1 |
| 134 | 68.7 | 109.8 | 181.9 | 126.1 | 162.2 | 149.1 | 117.5 | 169.9 | 162.7 |
| 135 | 342.4 | 599 | 423.7 | 336.6 | 593.1 | 454.2 | 196.2 | 246.7 | 390.2 |
| 138 | 376.2 | 149.8 | 97.5 | 172.2 | 167.1 | 141.1 | 170.9 | 102.7 | 126.1 |
| 139 | 109.4 | 107.8 | 120.5 | 114.4 | 131 | 110 | 134.2 | 47.6 | 78.6 |
| 140 | 50.4 | 4099.6 | 2561.4 | 1129.9 | 2225.8 | 4646.8 | 179.3 | 3587 | 3225.4 |
| 141 | 28.7 | 1684.3 | 2067.9 | 1954.8 | 1743.8 | 2519.7 | 838.9 | 2235.9 | 1940.3 |
| 144 | 530.5 | 489.8 | 450.9 | 680.6 | 482.9 | 521.4 | 406.9 | 3706.9 | 433.4 |
| 145 | 237.2 | 196.3 | 199.6 | 376.6 | 227.5 | 244 | 164 | 175.5 | 217.2 |
| 146 | 240 | 207.7 | 196.5 | 287 | 216.2 | 221.3 | 171.1 | 170.3 | 240.1 |
| 147 | 34.8 | 59.1 | 32.6 | 71.1 | 106.8 | 38 | 76.9 | 66.7 | 44.2 |
| 148 | 677.5 | 348.2 | 249.8 | 461.1 | 251.5 | 501.4 | 616.9 | 292.6 | 327.2 |
| 149 | 35.2 | 397.1 | 361.6 | 203.1 | 742.4 | 464.8 | 110.1 | 706.6 | 571 |
| 150 | 205.4 | 160.9 | 229.9 | 251 | 200.4 | 189.2 | 332.7 | 156.6 | 501.8 |
| 151 | 173.8 | 466.2 | 220 | 285.9 | 235.8 | 499.7 | 139.8 | 284.8 | 258.5 |
| 153 | 96.7 | 149.4 | 109.5 | 120 | 139.6 | 106.3 | 110.4 | 101.5 | 94.3 |
| 154 | 353.7 | 288.8 | 62.8 | 174.6 | 358.1 | 579.2 | 122.3 | 45.3 | 359.9 |
| 155 | 497.4 | 136.2 | 109.5 | 189.4 | 118.5 | 147.5 | 131.9 | 115.5 | 137.5 |
| 156 | 73 | 97.7 | 84.6 | 132.7 | 100.1 | 118.9 | 87 | 64.6 | 73 |
| 157 | 153 | 149.2 | 105 | 143.1 | 123.7 | 160.2 | 159 | 151.6 | 147.2 |
| 158 | 1.3 | 8.9 | 102.4 | 99.5 | 1.1 | 23.1 | 74.8 | 7.9 | 93.2 |
| 159 | 33 | 2887.3 | 3372.9 | 2710.7 | 3432.1 | 3979.2 | 1070.5 | 3809.9 | 4336.8 |
| 161 | 1.3 | 134.2 | 113.3 | 263.6 | 128.2 | 276.1 | 557.1 | 118.4 | 2.9 |
| 162 | 1735.6 | 170 | 24.1 | 264.5 | 702.3 | 122.3 | 365 | 31.1 | 85.1 |
| 164 | 94.6 | 209.1 | 2869.2 | 348.2 | 520.8 | 2102.6 | 33.2 | 1670.7 | 436.5 |
| 166 | 700.4 | 6433.5 | 9921.6 | 4090.9 | 7108.3 | 3609.5 | 3473.4 | 7815.7 | 5478.4 |
| 167 | 1.2 | 2320.4 | 1318 | 1994.5 | 3064.9 | 2291.7 | 729.2 | 3184.3 | 2565.5 |
| 168 | 190 | 593.2 | 775.5 | 598.1 | 769.2 | 610.1 | 414.8 | 1931.6 | 1123.8 |
| 169 | 512.2 | 4400.2 | 2669.8 | 2975.6 | 2812.9 | 6215.7 | 3878.6 | 1890.1 | 829.9 |
| 170 | 73.5 | 1014.4 | 2146.7 | 775.8 | 1454.9 | 1033.1 | 409.3 | 2535.1 | 867.2 |
| 171 | 5104.5 | 1332.2 | 272.6 | 2234.5 | 4145.4 | 565.7 | 3636.7 | 1.3 | 1.2 |
| 172 | 697.5 | 650.4 | 797.2 | 721.1 | 621.5 | 792.4 | 573.5 | 666.6 | 657 |
| 173 | 117 | 169.1 | 136.9 | 226.4 | 229 | 245.8 | 226.4 | 407.6 | 310.5 |
| 176 | 1.2 | 1.2 | 3906.6 | 275.7 | 74.8 | 809.2 | 3.4 | 2700.3 | 62.8 |
| 177 | 101 | 617.1 | 461.8 | 602.7 | 515.7 | 623.3 | 414 | 876.6 | 749.6 |
| 178 | 167.1 | 612.8 | 1577.1 | 197.3 | 112.9 | 554.5 | 318.8 | 310.2 | 64.7 |
| 179 | 153.4 | 58.6 | 90.9 | 90 | 66.8 | 93.5 | 114.4 | 42.3 | 93.2 |
| 180 | 501.7 | 70.9 | 72.4 | 141.5 | 208.3 | 85.6 | 126.3 | 91.4 | 102.8 |
| 181 | 624.8 | 12366.2 | 9356.2 | 8736.7 | 10384.9 | 9225.7 | 6284 | 9589 | 10736.6 |
| 182 | 416.7 | 513.2 | 472.4 | 300.9 | 658.9 | 537.7 | 246.8 | 533.1 | 527.2 |
| 183 | 2674.8 | 1193.3 | 1.1 | 989.7 | 2589.1 | 336.1 | 836.3 | 1.1 | 10.3 |
| 184 | 424.7 | 204.6 | 210.9 | 228.6 | 394.8 | 275.7 | 205.5 | 185.6 | 179.6 |
| 185 | 1535 | 1703.8 | 1133.3 | 2133.8 | 2209.6 | 911.3 | 1201.8 | 1162.9 | 1148.4 |
| 186 | 489.1 | 547.1 | 422.7 | 473 | 508.7 | 434.6 | 349.5 | 507.5 | 315 |
| 187 | 1394 | 260.6 | 57.1 | 168.9 | 226.7 | 84.5 | 424 | 34.5 | 60.7 |
| 188 | 257.6 | 162.3 | 197.5 | 380.9 | 488.7 | 103.9 | 313.1 | 102.5 | 160.7 |
| 189 | 66.4 | 86.3 | 121.9 | 244.8 | 239.7 | 78.6 | 190.3 | 75.4 | 112.2 |
| 190 | 78.1 | 83.5 | 429.5 | 280.5 | 102.5 | 357.6 | 91.9 | 97.6 | 84.8 |
| 191 | 5186 | 883.9 | 1804.8 | 892.9 | 1302.6 | 986.6 | 662.9 | 1537.4 | 1728.1 |
| 192 | 183.6 | 117.1 | 105.4 | 207.3 | 160.4 | 130.7 | 133.3 | 86.8 | 109.4 |
| 193 | 75.2 | 1034.1 | 1775.6 | 473 | 1246.2 | 728.5 | 400.4 | 2163.8 | 1704.8 |
| 194 | 35.4 | 141 | 109.3 | 203.6 | 162.4 | 216.6 | 81.4 | 282.5 | 166.3 |
| 195 | 166.4 | 286.5 | 375.7 | 319.3 | 152.4 | 274.8 | 209.4 | 184.4 | 172.6 |
| 196 | 3.1 | 6834.9 | 4672.9 | 5030.2 | 2309.2 | 6216.8 | 4103.7 | 6137.9 | 6356.5 |
| 197 | 99.9 | 104 | 74.8 | 123.9 | 144.8 | 74.6 | 78.7 | 42.6 | 76.1 |
| 198 | 64.1 | 63.1 | 53.4 | 170.6 | 81.1 | 107.7 | 53.7 | 58.8 | 105 |
| 199 | 831.8 | 240 | 58.3 | 107.9 | 91.4 | 602.1 | 232 | 56.8 | 73.6 |
| 200 | 526.8 | 384.3 | 120.9 | 388.4 | 798.8 | 293.1 | 355.9 | 148.2 | 153 |
| 201 | 8960.4 | 165 | 22.2 | 144.7 | 80.9 | 2818 | 2028.7 | 40.3 | 67.2 |
| 203 | 81.3 | 472.4 | 610.9 | 91.8 | 451.2 | 472.3 | 101.5 | 229.9 | 173.5 |
| 204 | 111.5 | 557.7 | 815 | 343.5 | 524.4 | 484.1 | 188.1 | 623.8 | 532.3 |
| 205 | 110.1 | 6177.9 | 4916.2 | 3074.2 | 4380.7 | 5662.9 | 2513.5 | 6031.4 | 4413.3 |
| 206 | 327.4 | 232 | 221.4 | 2279.4 | 1294.7 | 242.3 | 23853.3 | 182.8 | 201.2 |
| 207 | 140.6 | 1170.8 | 430.3 | 478 | 1596.2 | 1348.5 | 347.2 | 2523.2 | 2245.3 |
| 208 | 102.4 | 611.4 | 208 | 94.9 | 323 | 317.4 | 205.4 | 75 | 371.1 |
| 209 | 19.6 | 3466.7 | 4058.3 | 3621 | 1656.7 | 3787.3 | 1837.3 | 3395.9 | 2777.2 |
| 211 | 68.5 | 13748.3 | 30156 | 19158.6 | 20412.6 | 11472.5 | 5548.4 | 13311.6 | 18245.4 |
| 212 | 97.3 | 492.1 | 523.3 | 1191.7 | 274.3 | 490.1 | 563.4 | 430.6 | 523.7 |
| 213 | 118.2 | 98.7 | 138 | 131.3 | 79.4 | 72.3 | 107.5 | 56.1 | 87.5 |
| 215 | 74.5 | 1676.2 | 558.9 | 803.5 | 1642.3 | 2856.5 | 476.4 | 4663.2 | 3720.1 |
| 216 | 75.1 | 912.5 | 1082.4 | 602 | 874 | 1309.1 | 366.3 | 1248.6 | 1513.4 |
| 217 | 253.9 | 338.8 | 345.6 | 232.8 | 478.1 | 255.5 | 260.8 | 183.8 | 153.8 |
| 218 | 217.6 | 281.1 | 360.1 | 283.7 | 411.2 | 483.8 | 185.6 | 541.5 | 461.7 |
| 220 | 116.2 | 103.9 | 66.9 | 97.5 | 83.3 | 99.7 | 69.5 | 88.4 | 87.1 |
| 221 | 587 | 961.9 | 558.8 | 297.6 | 954.6 | 365.8 | 346.2 | 594 | 456.9 |
| 223 | 239.4 | 255 | 135.7 | 374.9 | 272.4 | 283.3 | 188.8 | 205.6 | 338.9 |
| 227 | 16526.9 | 687.5 | 402.1 | 801.2 | 8633.7 | 549.7 | 683 | 662.9 | 533.2 |
| 228 | 109.5 | 590.7 | 434.3 | 616.8 | 410.6 | 745.3 | 291.4 | 596.4 | 397.3 |
| 229 | 238.4 | 255.8 | 193.3 | 117.2 | 266.5 | 145.6 | 228.4 | 102.2 | 491.9 |
| 230 | 226.6 | 172.7 | 87.5 | 128.9 | 178.7 | 109 | 152.9 | 81.6 | 97.2 |
| 231 | 164.7 | 239.9 | 241 | 177.8 | 240.8 | 204.3 | 82.9 | 126.8 | 110.2 |
| 232 | 726.2 | 6011.4 | 69.4 | 4687.8 | 4109.5 | 1565.9 | 3685.2 | 55.1 | 121.4 |
| 233 | 1921.3 | 10660.6 | 3028 | 2711.7 | 7662.7 | 7862.6 | 1829 | 3283.3 | 5519.5 |
| 235 | 1985.5 | 721.4 | 238.4 | 931.8 | 2117.4 | 492.2 | 1437 | 77 | 96.1 |
| 236 | 111.5 | 389.5 | 124.3 | 281.9 | 194.3 | 199.7 | 268.5 | 87 | 132.1 |
| 237 | 678.2 | 2297.4 | 1864.1 | 1203 | 1986.1 | 1743 | 1173.9 | 1963.8 | 2872.9 |
| 238 | 100.7 | 1551.2 | 1160.8 | 572.2 | 1309.9 | 1228.5 | 451 | 1210.1 | 642.7 |
| 239 | 332.1 | 763.7 | 202 | 225.7 | 393.5 | 575.5 | 339 | 267.4 | 73.6 |
| 240 | 2452.6 | 853.2 | 251.5 | 167.9 | 951.3 | 599.5 | 378.3 | 208.9 | 113.2 |
| 241 | 3976.2 | 1815.3 | 487.3 | 320 | 1245.6 | 1299.5 | 844.5 | 423.8 | 113.2 |
| 242 | 22247.9 | 1204.2 | 676.7 | 2441.5 | 3900.1 | 2073.4 | 2060.1 | 1433.3 | 2211.8 |
| 243 | 500.8 | 602.3 | 147.7 | 417.4 | 460.7 | 206.9 | 420.7 | 210.1 | 264.1 |
| 244 | 408.8 | 194.7 | 250 | 139.3 | 215 | 163.3 | 362.3 | 191.9 | 185.1 |
| 246 | 346.4 | 311.5 | 153.6 | 129.5 | 426.7 | 193.8 | 297.6 | 237.1 | 115.3 |
| 247 | 228 | 128.5 | 128.2 | 180.1 | 149.8 | 122.1 | 119 | 95 | 82.6 |
| 248 | 84.9 | 198.9 | 142.5 | 115.1 | 171.7 | 266.5 | 76.9 | 113.4 | 199.3 |
| 249 | 1035.7 | 288.9 | 2257.9 | 857.3 | 1164 | 1466.9 | 537.1 | 513.5 | 696.2 |
| 251 | 264 | 88.8 | 78.2 | 123 | 232.6 | 138 | 74.6 | 121.3 | 124.6 |
| 253 | 108.7 | 314.2 | 326.6 | 251.4 | 350.9 | 226.2 | 192.2 | 227.9 | 226.6 |
| 254 | 141.8 | 397.1 | 285.7 | 91.7 | 668.4 | 932.2 | 144.2 | 644.2 | 128.5 |
| 255 | 158.7 | 631.9 | 1918.6 | 177.7 | 94.3 | 560.5 | 328.5 | 275.4 | 74 |
| 256 | 28050 | 525.2 | 120.3 | 424.5 | 151.7 | 1961.1 | 1539.7 | 156.2 | 137.1 |
| 257 | 114.5 | 99.8 | 83 | 100.6 | 201.5 | 126.4 | 86.7 | 157.4 | 157.6 |
| 258 | 158.6 | 49.9 | 1.2 | 230.7 | 87 | 162.9 | 312.2 | 9.5 | 188.6 |
| 259 | 1056.7 | 678.8 | 74.6 | 435 | 975.6 | 278.5 | 381.2 | 78.8 | 19.9 |
| 260 | 181.2 | 203.6 | 112.1 | 206.3 | 156.5 | 223.4 | 178.5 | 122.7 | 146.6 |
| 261 | 102.9 | 308.1 | 236.7 | 105 | 398.6 | 247.2 | 179 | 878.1 | 456.3 |
| 263 | 715.4 | 341.5 | 448.7 | 152.3 | 586.5 | 224.7 | 469.7 | 458.1 | 389 |
| 263 | 497.6 | 226.9 | 137.3 | 149.6 | 251 | 166.4 | 214.5 | 85.4 | 135.2 |
| 265 | 94.8 | 312.7 | 829.9 | 450.4 | 436.1 | 369.5 | 258.6 | 592.9 | 638.8 |
| 266 | 265.8 | 327 | 344.5 | 288.3 | 382.4 | 344.9 | 252.4 | 143.5 | 246 |
| 256 | 250.1 | 118.4 | 95.6 | 163.6 | 115.3 | 138.5 | 119.7 | 91.9 | 107.1 |
| 268 | 9.8 | 979.7 | 661.1 | 894.3 | 411.9 | 1696.9 | 366.1 | 409.7 | 1018.8 |
| 269 | 54 | 49.9 | 40.5 | 67.3 | 34.6 | 39.1 | 37.9 | 27 | 41.9 |
| 270 | 250 | 173.8 | 181.8 | 187.3 | 170 | 224.5 | 142.3 | 228.7 | 279.3 |
| 271 | 480.9 | 213.9 | 276.2 | 361 | 316 | 273.2 | 153.9 | 288.4 | 298 |
| 272 | 848.6 | 504.7 | 506.3 | 704.7 | 547.1 | 495.8 | 552.5 | 478.3 | 596.9 |
| 273 | 1.2 | 2102.3 | 4434.2 | 854.4 | 4432 | 2983.7 | 1404 | 2522.8 | 2416.9 |
| 274 | 1684.7 | 1062 | 218.2 | 668.5 | 812.7 | 391.8 | 925.2 | 159.9 | 290.7 |
| 275 | 287.7 | 447.3 | 282.7 | 622.1 | 481 | 245.2 | 328.9 | 276.9 | 234.7 |
| 276 | 24704.9 | 1039.3 | 565 | 1641.6 | 11368.8 | 805.3 | 1068.9 | 882.8 | 583 |
| 277 | 242 | 197.4 | 155.1 | 247.2 | 180.4 | 234.4 | 184.7 | 192.8 | 192.5 |
| 278 | 1231.4 | 973 | 145.3 | 901.4 | 1474.2 | 594.6 | 925.8 | 126 | 131.6 |
| 279 | 17.3 | 2232.4 | 2050.1 | 1268 | 1303.2 | 2923.4 | 900.4 | 2377.3 | 1977.2 |
| 280 | 59.4 | 2645.5 | 2730.2 | 1625.9 | 2545.4 | 3355.1 | 1233.4 | 2801.5 | 3378.5 |
| 281 | 11.1 | 384.8 | 65 | 38.7 | 71.4 | 100.9 | 103.7 | 14.1 | 17.9 |
| 282 | 608.4 | 296.3 | 256.6 | 463.7 | 205.6 | 325.1 | 415.2 | 194.5 | 210.3 |
| 283 | 332.9 | 264.5 | 234.2 | 544.1 | 264.3 | 374.3 | 400.4 | 291.5 | 271.4 |
| 284 | 78.3 | 67.8 | 69.4 | 78.9 | 68 | 92 | 71.1 | 59.9 | 88.3 |
| 285 | 128.1 | 76.9 | 110.6 | 115.5 | 106.6 | 107.8 | 83.1 | 89.2 | 95.8 |
| 286 | 136.9 | 882.8 | 1547.8 | 797.2 | 698 | 1112.3 | 458.4 | 673.7 | 251.9 |
| 287 | 133.4 | 121.2 | 112.9 | 117.4 | 91.9 | 158.2 | 87 | 70.4 | 94.5 |
| 288 | 171.7 | 149.6 | 158.2 | 178.1 | 157.8 | 201 | 117 | 123.4 | 124.4 |
| 289 | 2065.2 | 477.9 | 207.9 | 783.6 | 1036.1 | 420.3 | 2425.5 | 18.4 | 1.3 |
| 291 | 133.5 | 64.4 | 97.5 | 72.7 | 132.7 | 73.5 | 87.3 | 58.9 | 49.4 |
| 292 | 584.5 | 63.2 | 25 | 154.1 | 1191.9 | 660.3 | 757.5 | 27.5 | 40.9 |
| 293 | 85.6 | 186.6 | 107 | 288.9 | 87.8 | 189 | 235.3 | 128.1 | 55.8 |
| 295 | 99.7 | 791.3 | 242.3 | 325.4 | 327.2 | 175.4 | 230.6 | 133.1 | 144.9 |
| 296 | 676.2 | 918.1 | 709.4 | 934.2 | 1877.1 | 1141.7 | 589.6 | 753.4 | 857.2 |
| 297 | 208.1 | 61.9 | 45 | 125.1 | 78.1 | 67 | 128.8 | 33.5 | 56.2 |
| 298 | 486.9 | 293.3 | 320.6 | 257.4 | 410.5 | 356.9 | 211.9 | 196.2 | 400.4 |
| 299 | 238.1 | 923.6 | 448.9 | 1006.6 | 1054.5 | 910 | 660.9 | 696.1 | 686.7 |
| 300 | 215.4 | 203.8 | 395.4 | 255.6 | 312.3 | 188.4 | 202.2 | 244.5 | 347.9 |
| 301 | 212.9 | 290 | 820.4 | 372.3 | 708.3 | 367.5 | 860.1 | 1368.3 | 1185.7 |
| 302 | 29.5 | 25.8 | 10.5 | 19 | 34.5 | 45.7 | 38.4 | 9 | 11.2 |
| 303 | 244.8 | 782.2 | 902.3 | 349.1 | 907.8 | 713.9 | 323.7 | 823.8 | 976.6 |
| 304 | 1861.6 | 166.7 | 207.3 | 308.3 | 367.6 | 378.4 | 394.1 | 160.5 | 243.8 |
| 305 | 175.3 | 159.5 | 1205.8 | 156.7 | 144.6 | 223.3 | 176.9 | 191.7 | 180 |
| 306 | 257.6 | 154.3 | 146.1 | 240.3 | 149 | 206.8 | 136.3 | 126 | 182.9 |
| 307 | 140.9 | 142.6 | 126.5 | 207 | 130.3 | 179.3 | 122.6 | 127.1 | 144.6 |
| 308 | 51.2 | 1843.1 | 1030.9 | 1212.9 | 1456.7 | 2208.3 | 994.9 | 1319.8 | 3640.6 |
| 310 | 56.1 | 389.3 | 310.4 | 316.3 | 466.8 | 385.1 | 278.8 | 726.7 | 401.6 |
| 311 | 95.8 | 109.3 | 154.9 | 90 | 107.1 | 120.1 | 96.3 | 40.5 | 202.1 |
| 312 | 1.1 | 193.8 | 599 | 390.5 | 611.6 | 728.7 | 365.5 | 1657.6 | 289.8 |
| 313 | 114.1 | 119.7 | 208.9 | 142.2 | 124.9 | 120.7 | 102.2 | 171.4 | 137.5 |
| 314 | 228.4 | 414.8 | 146.7 | 189.2 | 419.3 | 985 | 268.1 | 164.1 | 805.7 |
| 315 | 106.4 | 758.2 | 540.2 | 634.9 | 351.4 | 466.9 | 317.2 | 369.3 | 322.4 |
| 316 | 87.3 | 363.4 | 151 | 353 | 425.1 | 312.8 | 284.4 | 214.7 | 159.2 |
| 317 | 349.5 | 178.8 | 142.4 | 246 | 187.7 | 213.8 | 173.4 | 172.5 | 170.8 |
| 318 | 41 | 165 | 47.1 | 88.3 | 62.8 | 174.6 | 58.9 | 29.9 | 36.8 |
| 319 | 434.9 | 249.1 | 85.8 | 420.7 | 189.3 | 189.1 | 249.8 | 96.7 | 149.6 |
| 320 | 107.4 | 586.7 | 418.3 | 403.8 | 488.4 | 523.9 | 404.2 | 689.4 | 494.1 |
| 321 | 543.8 | 319.1 | 469.7 | 514.1 | 488.3 | 438.7 | 255 | 599.8 | 413.8 |
| 322 | 143.6 | 271.4 | 269.5 | 298.2 | 237 | 237.4 | 211.8 | 133.2 | 239 |
| 323 | 70.7 | 3285.6 | 3624.3 | 1105.3 | 4318.5 | 2487.4 | 569 | 2285.5 | 3132.6 |
| 324 | 83.1 | 109.6 | 285.4 | 143.7 | 116.7 | 132.5 | 85.8 | 120.8 | 77.4 |
| 325 | 110.9 | 251.9 | 316.5 | 290 | 236.5 | 383.2 | 230.7 | 313.5 | 303.7 |
| 326 | 135.5 | 3242.5 | 8125.6 | 4127.5 | 5469.6 | 4502.9 | 1608.5 | 3693.9 | 2895.8 |
| 327 | 58.5 | 45 | 1.2 | 25 | 59.9 | 35 | 17.5 | 37.7 | 1.1 |
| 328 | 65.8 | 655.8 | 464.1 | 320.5 | 288.4 | 542.9 | 197.8 | 325.2 | 508.2 |
| 329 | 80 | 64.2 | 69 | 112.3 | 56 | 94.8 | 79.6 | 45.7 | 59.5 |
| 330 | 40.5 | 80.1 | 60.7 | 58 | 25.8 | 201.8 | 52.3 | 15.2 | 35 |
| 331 | 432.9 | 313.6 | 325.8 | 596 | 282.5 | 296.4 | 296.4 | 323.7 | 289.3 |
| 333 | 130.6 | 705.5 | 966.7 | 555.7 | 561.6 | 839.7 | 421.8 | 765.6 | 867.7 |
| 334 | 249.3 | 142.3 | 160.4 | 202.9 | 176.2 | 182.3 | 124.3 | 206.3 | 169.1 |
| 335 | 82.5 | 80.4 | 83 | 109.4 | 123.6 | 101.9 | 119.4 | 73.9 | 145.7 |
| 336 | 190.4 | 460 | 647.9 | 449.1 | 599.6 | 811.8 | 357.9 | 794.4 | 514 |
| 337 | 325.2 | 155.4 | 169.1 | 87.4 | 565.9 | 331.4 | 139.4 | 121 | 218.6 |
| 338 | 456.9 | 208.6 | 167.7 | 232 | 253.9 | 347.6 | 196.9 | 230.3 | 166.2 |
| 339 | 286.9 | 555.1 | 405.8 | 559 | 379.8 | 628.6 | 310.9 | 351.5 | 538.6 |
| 340 | 512.3 | 229.9 | 206.7 | 351.4 | 259.7 | 284.5 | 241.8 | 186.5 | 258.4 |
| 341 | 149.5 | 767.9 | 579.4 | 500.3 | 838.9 | 598.2 | 472.1 | 804.7 | 865.1 |
| 343 | 152.9 | 40.5 | 579 | 1479.8 | 52.4 | 120.2 | 411.9 | 326.7 | 85 |
| 344 | 233.7 | 1144.2 | 879.2 | 1306.4 | 1034.5 | 1267 | 1054.1 | 1516.9 | 1049.3 |
| 345 | 371.6 | 243.5 | 219 | 304.9 | 271.1 | 232.5 | 238.5 | 219.9 | 295.3 |
| 347 | 98.2 | 3633.1 | 2744.6 | 2838.4 | 3198.4 | 4569.8 | 1600.1 | 1448.8 | 3315.8 |
| 348 | 78.5 | 6124.8 | 6613.5 | 4006.5 | 4485.3 | 7289.4 | 3180.7 | 2561.5 | 5272.3 |
| 349 | 582.7 | 260 | 240.8 | 164.6 | 205.7 | 203.8 | 225.1 | 195.3 | 203.1 |
| 350 | 355.9 | 281.6 | 330.4 | 285.5 | 454.2 | 255 | 105.2 | 161.7 | 183.4 |
| 351 | 732.9 | 348.3 | 47.4 | 261.9 | 443.7 | 347.8 | 457.3 | 73.6 | 169.9 |
| 352 | 162.3 | 297 | 339.9 | 197.7 | 488.4 | 390.6 | 178.5 | 201.7 | 300.5 |
| 353 | 186.4 | 405.1 | 211.5 | 354.7 | 282.6 | 265.3 | 148.4 | 203 | 378.9 |

3b

| SEQ ID NO: | 820TT | 821TT | 822TT | 823TT | 824TT | 825TT | 827TT | 828TT | 829TT |
|---|---|---|---|---|---|---|---|---|---|
| 354 | 101.8 | 32.1 | 469 | 263.8 | 1085.8 | 22 | 126.1 | 35 | 1609.8 |
| 355 | 50.1 | 45.1 | 504.2 | 78.3 | 2521.5 | 71 | 173 | 79.8 | 1017.3 |
| 356 | 697.4 | 939.2 | 1065.9 | 788.9 | 148.7 | 218.1 | 645.8 | 867.3 | 539.6 |
| 357 | 470.4 | 512.9 | 724.1 | 516.5 | 395.9 | 181 | 909.4 | 596 | 552.3 |
| 358 | 572.8 | 424.1 | 483.2 | 901.7 | 829.4 | 659.8 | 1454.2 | 582.7 | 1006.9 |
| 359 | 347.5 | 382.6 | 400.4 | 351.2 | 192.3 | 373.5 | 325.1 | 300.2 | 434.7 |
| 362 | 518.5 | 320.1 | 492.7 | 704.3 | 136.5 | 151.1 | 355.4 | 543.3 | 388.6 |
| 360 | 319.8 | 228.6 | 329.3 | 403.7 | 774.2 | 179.6 | 366.3 | 240.3 | 358.5 |
| 361 | 480.9 | 1229.9 | 857.7 | 620.4 | 288.1 | 256 | 1180.4 | 566.6 | 668.1 |
| 363 | 418.7 | 427.1 | 382.7 | 545 | 359 | 1019.2 | 338.9 | 487.8 | 695 |
| 1 | 693.8 | 684 | 807.9 | 656.3 | 335.6 | 360.3 | 549.1 | 242.6 | 662.7 |
| 2 | 1188.2 | 4262.8 | 2973.5 | 2345.3 | 485.6 | 836.8 | 2548.2 | 5155 | 2907.2 |
| 7 | 285 | 570.3 | 706.5 | 933.7 | 231.3 | 398 | 465.3 | 243.7 | 598.5 |
| 8 | 772 | 941.1 | 585.4 | 1410 | 767.6 | 899.7 | 976.4 | 715.3 | 1364.2 |
| 9 | 6790.1 | 6640.5 | 7386.3 | 3225.8 | 5435.7 | 126.3 | 4807.5 | 1611.9 | 3114.7 |
| 10 | 127.8 | 73.6 | 88.9 | 165.8 | 1940.4 | 149.4 | 211.5 | 105.7 | 161.7 |
| 11 | 219.2 | 282.4 | 325.1 | 111.4 | 558 | 78.5 | 557.8 | 260.1 | 213.2 |
| 13 | 97.3 | 102.3 | 156.9 | 158.8 | 964.8 | 160.6 | 157.6 | 106.2 | 231.8 |
| 14 | 280.4 | 281.5 | 511.4 | 335.9 | 1351.5 | 111.1 | 708.2 | 213 | 543.4 |
| 15 | 407.6 | 174.9 | 613.5 | 2405.8 | 5398.8 | 42.5 | 1013.9 | 261.5 | 818.7 |
| 16 | 996 | 867.4 | 1065.2 | 1313.3 | 639.8 | 600.3 | 893.2 | 655.3 | 1176.4 |
| 17 | 905 | 1286.8 | 1004.5 | 1341.4 | 3130.7 | 458.2 | 571.6 | 1357.1 | 567.7 |
| 19 | 176.2 | 160.5 | 2137 | 215.5 | 362.5 | 258.3 | 1756.9 | 171.6 | 407.1 |
| 20 | 2.8 | 1.1 | 5.6 | 55.2 | 3077.9 | 1.1 | 341.3 | 1.2 | 120.3 |
| 21 | 198.4 | 8.3 | 87.4 | 53.3 | 32.8 | 37.4 | 1005.1 | 37.9 | 87.5 |
| 22 | 6631.1 | 1931.6 | 3566.8 | 5632 | 5189.5 | 1534.9 | 4150.7 | 7366.1 | 5102.6 |
| 23 | 182.8 | 21.2 | 532.3 | 340.7 | 1711.8 | 1.1 | 1721.4 | 40.1 | 764.8 |
| 24 | 77.8 | 33.2 | 358.6 | 267.6 | 422.3 | 74.6 | 370.7 | 37.1 | 206.7 |
| 26 | 295.9 | 149.3 | 5582.1 | 822 | 2610.5 | 73.9 | 6672.8 | 337.8 | 2827.2 |
| 27 | 919.8 | 264.6 | 443.1 | 611.7 | 683.8 | 209.2 | 1842.7 | 221 | 356.4 |
| 29 | 70.7 | 70.7 | 74.8 | 144.2 | 604.4 | 984.4 | 261 | 138.9 | 191.1 |
| 30 | 121.9 | 25.4 | 650.1 | 375.7 | 4468.9 | 46.5 | 561.6 | 45.4 | 242.8 |
| 31 | 5697.5 | 123.5 | 224.1 | 147.9 | 1115.1 | 83.1 | 610.3 | 182 | 319.6 |
| 33 | 468.4 | 153 | 716.1 | 13385.7 | 6334.6 | 140.7 | 1847 | 224.8 | 1175.1 |
| 34 | 1720.2 | 2051.3 | 3037.5 | 1584.2 | 336.1 | 3724.7 | 2119 | 5586.2 | 2611 |
| 35 | 244.1 | 41.7 | 84.2 | 62.7 | 824.1 | 52.2 | 178.2 | 17.4 | 1328.5 |
| 36 | 119.6 | 118 | 169.3 | 230.6 | 1819.9 | 929.8 | 683 | 492.9 | 214.8 |
| 37 | 155.7 | 184.2 | 228.5 | 240.8 | 319.5 | 467.7 | 184.9 | 199.9 | 387.7 |
| 38 | 585.2 | 232.7 | 573.6 | 6068.7 | 4340.6 | 74.3 | 1214.6 | 360.9 | 671.8 |
| 40 | 591.8 | 535.9 | 446.1 | 487.3 | 508.4 | 640.3 | 459 | 382.6 | 707.6 |
| 41 | 125.3 | 451.1 | 286.6 | 226.1 | 178.8 | 297.4 | 551.6 | 110.9 | 268.1 |
| 42 | 208.6 | 409.7 | 329.7 | 258.1 | 211.2 | 288.8 | 404.4 | 466.9 | 264.3 |
| 43 | 1026.6 | 218.9 | 326.6 | 574.3 | 230.1 | 671.1 | 309 | 239.3 | 385 |
| 44 | 615.3 | 369.3 | 535.2 | 505 | 392.7 | 412.7 | 711.3 | 532.7 | 637 |
| 45 | 520.7 | 482.1 | 383.7 | 299.9 | 78.6 | 389.4 | 649.9 | 316.5 | 478.7 |
| 46 | 320.2 | 300.6 | 305.2 | 401.7 | 263.7 | 512.6 | 527.8 | 382.7 | 432.7 |
| 47 | 139.1 | 150.5 | 229.5 | 149.7 | 531.9 | 197.1 | 197.3 | 127 | 210.4 |
| 48 | 1.3 | 21.1 | 476.7 | 92.9 | 168.2 | 12.9 | 551.2 | 39.1 | 389.5 |
| 49 | 166.1 | 218.5 | 298.7 | 280.5 | 457.8 | 255.1 | 900.8 | 192.7 | 389.9 |
| 50 | 347.9 | 99.6 | 314.6 | 484.2 | 1930.4 | 50 | 732 | 80.5 | 471.8 |
| 51 | 242.8 | 1.5 | 41.1 | 67.7 | 580.8 | 328.7 | 355.4 | 25.4 | 109.3 |
| 52 | 192.8 | 248.6 | 243.7 | 205.8 | 370.9 | 381.6 | 276.2 | 205.6 | 177.2 |
| 53 | 96.2 | 87.9 | 70.9 | 47.3 | 43.3 | 73.7 | 337.6 | 95.3 | 151.9 |
| 54 | 407.4 | 1349.6 | 375.9 | 248.1 | 781 | 299.7 | 1508.8 | 490.7 | 389.2 |
| 55 | 121.8 | 106.2 | 97.6 | 87.5 | 86 | 144.3 | 103.2 | 108.1 | 117.5 |
| 56 | 45.3 | 148.5 | 66.5 | 67 | 89.3 | 49.7 | 49.3 | 42.5 | 86.4 |
| 57 | 676 | 281.8 | 885.5 | 948.4 | 804.4 | 353.9 | 504.6 | 82.9 | 3332.6 |
| 58 | 778.6 | 312.3 | 1214.5 | 1060.8 | 1872 | 293.1 | 691.4 | 84.7 | 3886.7 |
| 59 | 1030.8 | 2434.1 | 2195.8 | 1055.8 | 320 | 324.2 | 1155.1 | 1409.3 | 875.3 |
| 60 | 135.3 | 164.3 | 164.2 | 188.6 | 621.3 | 165.8 | 256 | 106.3 | 154.4 |
| 61 | 162.8 | 141.6 | 158.3 | 159.3 | 275.5 | 228.7 | 281.2 | 168.6 | 177.2 |
| 62 | 4949.9 | 24.3 | 607 | 1227.9 | 429.7 | 1067.9 | 763.2 | 300.6 | 2120.4 |
| 63 | 484.5 | 316.4 | 328.9 | 307.7 | 341.1 | 48.2 | 473.5 | 163.4 | 154.3 |
| 64 | 204.6 | 186.8 | 246.6 | 401.8 | 70.3 | 580.2 | 1442.7 | 100.3 | 242.1 |
| 65 | 65.5 | 179.7 | 174.9 | 187.7 | 722.1 | 50 | 248.4 | 72.4 | 115.2 |
| 66 | 773.7 | 1116.3 | 780.2 | 512.2 | 301 | 358.5 | 869.5 | 898.9 | 607.4 |
| 67 | 28999.8 | 29358.2 | 32402.2 | 37818.6 | 3337.4 | 25748.4 | 22954.2 | 36641 | 37486.1 |
| 68 | 416.7 | 3006.9 | 3943.7 | 3062.4 | 153 | 2880.9 | 1180.9 | 1284.8 | 2957.1 |
| 69 | 1079.4 | 7132.7 | 8048.4 | 4826.8 | 649.2 | 8495.4 | 5023.1 | 8078.4 | 7915.3 |
| 70 | 6077.8 | 1872.9 | 984 | 682.7 | 249.3 | 3261.4 | 4520.3 | 1401.4 | 911.7 |
| 71 | 132.3 | 112.4 | 422.9 | 210.1 | 2216.8 | 82.9 | 814.1 | 97.5 | 287.6 |
| 72 | 490.8 | 1451.8 | 1261.7 | 235.1 | 471.1 | 74.1 | 306.4 | 974.8 | 1198.6 |
| 73 | 348.5 | 369.6 | 410.2 | 281.9 | 216.9 | 255.6 | 357.1 | 221.4 | 359.5 |
| 75 | 419.5 | 82.9 | 224.3 | 363.6 | 248.7 | 233.6 | 379.3 | 555 | 287.7 |
| 76 | 11.9 | 119.6 | 100.8 | 434.7 | 2481.2 | 1185 | 1252.2 | 685.6 | 485.4 |
| 77 | 4580.1 | 3450.4 | 5301.7 | 6090.7 | 261.8 | 3157.9 | 2146 | 4545.6 | 3500.3 |
| 78 | 1117.1 | 545.1 | 716.9 | 909.9 | 254.8 | 255.9 | 868 | 1420.7 | 711.9 |
| 79 | 530 | 164.2 | 183.5 | 180.9 | 240.5 | 155.8 | 185.8 | 142.8 | 115.9 |
| 80 | 603.5 | 1468.6 | 828.2 | 186.8 | 153.5 | 1495.3 | 273.8 | 761.5 | 324.2 |
| 81 | 1295.1 | 100.2 | 158.7 | 133.6 | 628.6 | 130 | 314.3 | 106.5 | 383.7 |
| 82 | 337 | 330.3 | 245.9 | 228.3 | 61.7 | 460.2 | 141 | 303.9 | 207.5 |
| 84 | 106.4 | 568.8 | 287.1 | 105.9 | 114.1 | 486.2 | 497.7 | 114.6 | 176.9 |
| 85 | 172.3 | 125.3 | 120 | 175.2 | 169 | 193.1 | 218.4 | 131.9 | 194 |
| 86 | 87 | 87.2 | 53.6 | 86.3 | 89.1 | 131.6 | 85 | 639.6 | 137 |
| 87 | 214.5 | 168.9 | 252.9 | 285.8 | 1403.4 | 202.4 | 230.4 | 184.8 | 289.6 |
| 88 | 1660.9 | 2332 | 6323.6 | 5821 | 275.2 | 1272.1 | 4080.3 | 7866.9 | 5791.5 |
| 89 | 206 | 177.6 | 198 | 327.1 | 1314.5 | 479.1 | 253.4 | 182.8 | 368.1 |
| 90 | 115.4 | 102.5 | 134.4 | 235.2 | 2070.3 | 140.2 | 141 | 111.9 | 226.2 |
| 91 | 502.7 | 105.1 | 1042 | 284.8 | 1947.8 | 244.5 | 511.1 | 18.4 | 4872 |
| 92 | 6425 | 5848 | 4350.4 | 2893.7 | 766.3 | 1143 | 8256.4 | 4985.1 | 2390.7 |
| 93 | 205.6 | 230.3 | 307.5 | 325 | 218.5 | 186.3 | 253.4 | 252 | 154.8 |
| 94 | 357.1 | 1091.1 | 1411.5 | 311.1 | 158.3 | 46.1 | 509.8 | 632.4 | 557.7 |
| 95 | 241.3 | 283.6 | 505 | 576.3 | 62.8 | 172.8 | 115.5 | 216.1 | 532 |
| 96 | 280.5 | 181.9 | 147 | 142.4 | 142.7 | 170.7 | 216.5 | 116.6 | 156.5 |
| 97 | 466.6 | 344 | 322 | 221.4 | 70.5 | 218.7 | 225.5 | 294.9 | 178.2 |
| 98 | 23.3 | 32.5 | 29.3 | 22.1 | 31.8 | 317.2 | 35.8 | 22 | 26.8 |
| 99 | 200.6 | 212.8 | 216.1 | 258.2 | 243.6 | 366.3 | 323 | 184.2 | 327.9 |
| 100 | 1421.1 | 302.2 | 3029.1 | 5780.9 | 673.2 | 1623.5 | 2932.3 | 3304.8 | 11319.8 |
| 101 | 272 | 218 | 267.6 | 467.2 | 55.2 | 386.1 | 265.8 | 234.8 | 421.9 |
| 102 | 152.6 | 160.8 | 134.1 | 185.4 | 141.5 | 525.5 | 8297.9 | 131.6 | 193.5 |
| 103 | 330.3 | 366.8 | 262.3 | 438.6 | 370.5 | 687.6 | 328.6 | 308.6 | 379.9 |
| 104 | 678.2 | 302.2 | 864.8 | 623.8 | 62.2 | 907.1 | 333.9 | 1068.4 | 672.3 |
| 105 | 495.9 | 329.5 | 905.2 | 487.5 | 77.9 | 996.4 | 425 | 1136.1 | 616.5 |
| 106 | 612.3 | 277.5 | 775 | 557.3 | 34.6 | 814.9 | 280 | 957.1 | 583.4 |
| 107 | 308.9 | 188.7 | 250.9 | 591.6 | 1517.4 | 241.8 | 305 | 161.8 | 1102.6 |
| 108 | 388.5 | 475.8 | 557.1 | 574.6 | 533.2 | 365.7 | 509.2 | 634 | 321.6 |
| 109 | 47.9 | 211.4 | 334.1 | 275.6 | 373.3 | 113.2 | 1573 | 359.4 | 1203.1 |
| 110 | 1.1 | 367.7 | 820.1 | 614 | 750.8 | 2.3 | 2128.4 | 450.7 | 2481.1 |
| 111 | 105.4 | 111.5 | 1115.1 | 1085.4 | 31.9 | 1134.1 | 919.7 | 2507.5 | 1720.3 |
| 112 | 62.4 | 132.4 | 118.7 | 104.6 | 124.9 | 88.9 | 1090.7 | 12.5 | 512.4 |
| 113 | 149.1 | 66.5 | 145.6 | 225.3 | 1395.8 | 112.7 | 316.5 | 230.1 | 145.4 |
| 114 | 929.6 | 594 | 672 | 804.4 | 155.5 | 238.7 | 339.5 | 618.6 | 378.6 |
| 115 | 473.6 | 276.3 | 355.8 | 431 | 779.1 | 286.2 | 826.4 | 464.8 | 562.1 |
| 116 | 228.8 | 183.6 | 205.8 | 214.2 | 113.4 | 286 | 233.8 | 157.3 | 281.6 |
| 117 | 1259.3 | 645.9 | 2714.7 | 1854.7 | 284.3 | 889.6 | 776.5 | 5906.8 | 1981.4 |
| 118 | 165 | 99.4 | 148.2 | 154 | 104.5 | 952.7 | 926.2 | 63.2 | 218.8 |
| 119 | 74.1 | 55.5 | 95.2 | 192.8 | 129.2 | 122.6 | 138.9 | 69 | 252.5 |
| 120 | 154.7 | 88.6 | 159.7 | 229.3 | 533 | 78.8 | 126.8 | 101.7 | 185.5 |
| 121 | 470.8 | 523.4 | 1077.7 | 284.1 | 270.2 | 79.9 | 1935.6 | 440.9 | 773.2 |
| 122 | 139.1 | 32 | 51.8 | 203.5 | 559 | 116.7 | 160.9 | 98.4 | 167.8 |
| 123 | 127.6 | 127.8 | 146.6 | 223 | 86.8 | 290.5 | 147 | 161 | 152.7 |
| 124 | 323.6 | 121.6 | 123 | 147.7 | 138.1 | 317.3 | 2203.4 | 125.6 | 200.2 |
| 125 | 909.9 | 886.8 | 770.6 | 1100 | 653.6 | 1873.2 | 823.8 | 980.3 | 1308.7 |
| 126 | 865.4 | 1870.3 | 1455.2 | 950.6 | 132.1 | 353.6 | 443.8 | 1299.3 | 756.7 |
| 127 | 146.8 | 89.1 | 116.4 | 108.3 | 102.8 | 176.3 | 89.7 | 112.1 | 164.4 |
| 128 | 199.2 | 243.1 | 243.5 | 292.8 | 184.9 | 435.5 | 169371.4 | 255.3 | 380.5 |
| 129 | 201 | 129.2 | 160.1 | 346.8 | 964 | 143.6 | 229.7 | 180.9 | 349.9 |
| 130 | 436.5 | 199.9 | 143.8 | 114.3 | 61.5 | 134.4 | 300.8 | 73.2 | 120.4 |
| 131 | 133.9 | 92.3 | 74.4 | 88.5 | 83.4 | 229.7 | 410.5 | 60.2 | 101.7 |
| 132 | 170.5 | 183.6 | 217.5 | 279 | 177.9 | 291.2 | 172.6 | 176.3 | 285.9 |
| 133 | 76.5 | 158.5 | 71.8 | 115.2 | 44.6 | 280.4 | 133.9 | 76.6 | 58.9 |
| 134 | 177.7 | 117.6 | 92.6 | 87.1 | 47.4 | 135.3 | 194.3 | 131.1 | 125.4 |
| 135 | 668.9 | 332.2 | 491.2 | 604 | 177.1 | 258 | 426.2 | 374.2 | 376.3 |
| 138 | 89.5 | 107.6 | 139.2 | 104.1 | 252.7 | 204.2 | 408.1 | 146.3 | 173.8 |
| 139 | 94.5 | 61.7 | 100.1 | 154 | 66.7 | 109.2 | 217.6 | 69.7 | 69.7 |
| 140 | 488.1 | 5040.7 | 5478 | 884.2 | 19.9 | 864.2 | 414.1 | 2686.3 | 2320.6 |
| 141 | 1820.2 | 2069.9 | 1896.4 | 1208 | 195.6 | 666 | 1637.7 | 1312.8 | 1389.1 |
| 144 | 389.9 | 2941 | 519.1 | 509.5 | 290.3 | 566.4 | 3501.1 | 2333.5 | 594.6 |
| 145 | 176.7 | 233.5 | 205.8 | 273.5 | 163.7 | 364.5 | 169 | 239.5 | 307.6 |
| 146 | 180.4 | 184.7 | 182 | 241.3 | 165.7 | 371.9 | 208.9 | 218.9 | 287.1 |
| 147 | 60.6 | 67.5 | 36.5 | 35.9 | 45 | 33 | 48.8 | 39.7 | 84.2 |
| 148 | 218 | 311.7 | 680.6 | 305.9 | 613.6 | 301.8 | 333.6 | 170.7 | 855.4 |
| 149 | 389.2 | 615.3 | 612.9 | 411.2 | 46.9 | 38.6 | 377.1 | 483.8 | 290.4 |
| 150 | 292.4 | 123.3 | 170.9 | 249.3 | 169.9 | 382.6 | 1326 | 246.2 | 272.1 |
| 151 | 172.2 | 109.5 | 207.1 | 176.5 | 173 | 197.7 | 201.3 | 53.4 | 217.8 |
| 153 | 100.2 | 143.8 | 139 | 113.1 | 97.6 | 119 | 115.6 | 97.7 | 102.5 |
| 154 | 965.5 | 130.7 | 240.3 | 422.3 | 239.6 | 103.1 | 344.9 | 332 | 536.6 |
| 155 | 150.4 | 145.1 | 158.1 | 122 | 114.6 | 231.1 | 116.7 | 136.3 | 190.3 |
| 156 | 72.3 | 57.3 | 76.9 | 97.8 | 60.5 | 106.5 | 85.4 | 49.1 | 91.7 |
| 157 | 92.1 | 101.4 | 129.5 | 97.6 | 197.6 | 183.4 | 266.9 | 102.3 | 169 |
| 158 | 105.7 | 18.1 | 95.3 | 31 | 1.1 | 1.5 | 124 | 10.3 | 17.7 |
| 159 | 3118.9 | 2438.5 | 2254 | 4357.3 | 169.7 | 2658.7 | 1376.2 | 3763.9 | 2939.4 |
| 161 | 5.6 | 102 | 74.9 | 43.7 | 13.3 | 206.3 | 5.9 | 19.5 | 43 |
| 162 | 86.4 | 52.8 | 243.7 | 212.1 | 2021.6 | 52.6 | 430 | 59.9 | 191.7 |
| 164 | 75.9 | 635.3 | 125.4 | 46.6 | 62.7 | 90.5 | 4939.7 | 520.4 | 106.5 |
| 166 | 8478.4 | 8844.4 | 7517.8 | 9251.3 | 668.6 | 5048 | 2532 | 11114.9 | 5155.6 |
| 167 | 944.4 | 2088.2 | 2168.9 | 3078.3 | 35.4 | 2685.3 | 569.9 | 438.5 | 2149.5 |
| 168 | 981.2 | 741.9 | 536.9 | 381.5 | 101.8 | 263.9 | 1589.1 | 1090 | 1157.8 |
| 169 | 998.2 | 828.4 | 1558.6 | 3346.8 | 4596.6 | 373.2 | 2769.4 | 732.9 | 18910.1 |
| 170 | 1690.4 | 2036.1 | 1458.2 | 1172.6 | 1929.3 | 472.1 | 1536.6 | 1074.1 | 748.2 |
| 171 | 35.6 | 1.2 | 1357.1 | 179.9 | 2986.6 | 1.2 | 1399.7 | 39.7 | 3790.7 |
| 172 | 660.5 | 696.5 | 574.5 | 822 | 549.6 | 679.2 | 517.6 | 539 | 873.1 |
| 173 | 172.3 | 120.5 | 182.9 | 172.3 | 441.6 | 91 | 875.5 | 186.4 | 445.7 |
| 176 | 1.1 | 32.1 | 22.8 | 1.1 | 1.1 | 269.9 | 3233.2 | 1.1 | 160.9 |
| 177 | 675.5 | 641.9 | 541.6 | 1175.8 | 196.5 | 1163.3 | 437.1 | 345.5 | 599.4 |
| 178 | 144.2 | 121.8 | 72.4 | 360.4 | 1481.8 | 1025 | 2178.6 | 88.7 | 313.7 |
| 179 | 52.1 | 87.1 | 93.5 | 143.3 | 81.8 | 124.1 | 75.4 | 43.4 | 153.8 |
| 180 | 95.7 | 66.1 | 137.1 | 160.5 | 253.7 | 190.5 | 496.2 | 69.1 | 199.3 |
| 181 | 8377.6 | 9185.5 | 10162.2 | 11258.5 | 1081.7 | 11429.6 | 5621.9 | 12118.4 | 10006.8 |
| 182 | 458.5 | 488.6 | 593.1 | 336.2 | 742.2 | 148.2 | 383.4 | 287.6 | 393.9 |
| 183 | 41.7 | 8.1 | 711.7 | 110.5 | 624.4 | 1.2 | 1507 | 41.7 | 551.1 |
| 184 | 241.8 | 165.4 | 281.2 | 458.9 | 346.3 | 189.5 | 244.1 | 175.4 | 339.3 |
| 185 | 1648.2 | 527.4 | 1463 | 1633.2 | 3854.7 | 591.4 | 1805.1 | 1354.3 | 962 |
| 186 | 852.3 | 370.9 | 554.5 | 405.8 | 293.7 | 714.5 | 452.3 | 164.8 | 319.5 |
| 187 | 81.4 | 76.3 | 149.6 | 122.4 | 192.9 | 83.5 | 4783 | 75.8 | 136.5 |
| 188 | 325.5 | 64.9 | 281 | 153.1 | 548.5 | 72.7 | 239.9 | 148.5 | 260.2 |
| 189 | 179.1 | 36.6 | 199.4 | 99.5 | 226.7 | 74.1 | 111.4 | 100 | 151.7 |
| 190 | 65.2 | 56.7 | 57.5 | 206 | 147 | 170.8 | 473.9 | 107.2 | 158.5 |
| 191 | 1282.4 | 180.6 | 706.5 | 991.9 | 1859.6 | 193.4 | 671.8 | 1181.2 | 884.9 |
| 192 | 133.1 | 59.7 | 97.6 | 101 | 117.7 | 186.9 | 1346.8 | 80.1 | 111.3 |
| 193 | 2817 | 1551 | 1158.4 | 1627.3 | 211 | 677.6 | 728.5 | 2190.6 | 745.3 |
| 194 | 224.1 | 133.7 | 191.1 | 211.3 | 94.6 | 57.1 | 198.5 | 79.7 | 112.4 |
| 195 | 210.1 | 378.3 | 415.7 | 457.7 | 91.8 | 391.3 | 167.4 | 250.9 | 161.2 |
| 196 | 2059.1 | 6068.9 | 8250.3 | 6100.2 | 260.4 | 9272.9 | 4421.5 | 2709.1 | 7446.4 |
| 197 | 116.3 | 74.9 | 72.5 | 69.9 | 1094.7 | 92.5 | 126.6 | 97.4 | 137.7 |
| 198 | 69.1 | 54.5 | 79.3 | 90.4 | 64.8 | 142.2 | 658.4 | 74.2 | 125.9 |
| 199 | 73.1 | 63 | 674.4 | 113.7 | 3555.6 | 87.8 | 295.6 | 125.9 | 1666.8 |
| 200 | 152.4 | 193.6 | 440 | 136.7 | 1166.9 | 233.9 | 450.3 | 193.7 | 343.6 |
| 201 | 101.2 | 31 | 560.4 | 302.8 | 1214.5 | 17.7 | 90 | 30.4 | 1612.8 |
| 203 | 703.7 | 907.4 | 1270.8 | 514 | 92.1 | 126.9 | 1145.2 | 1552.7 | 207.6 |
| 204 | 1285.1 | 377.7 | 403 | 705.2 | 88.6 | 338.5 | 595.2 | 922.9 | 476.3 |
| 205 | 2463.4 | 3054.5 | 3730.8 | 4980.4 | 361.5 | 572.3 | 3463.4 | 6141.2 | 3833.2 |
| 206 | 187.4 | 167.3 | 168.6 | 267.3 | 1097.9 | 453.7 | 228.3 | 296.2 | 3177.1 |
| 207 | 288.4 | 3037.3 | 2123.7 | 206.1 | 61.4 | 218.8 | 485.6 | 2438.3 | 1258.7 |
| 208 | 190.3 | 97.4 | 336.5 | 323 | 109.9 | 9.2 | 306.2 | 227.8 | 548.3 |
| 209 | 3259.2 | 3551.6 | 5575.6 | 2237.4 | 150.6 | 4727.5 | 1832.2 | 732.2 | 3005.4 |
| 211 | 8683.6 | 22986.2 | 20317.7 | 33405.4 | 565 | 7384.7 | 9662.3 | 29932.5 | 20413.1 |
| 212 | 1572 | 515.7 | 339.7 | 208.5 | 80.1 | 1016.3 | 1086.1 | 339.2 | 299.9 |
| 213 | 94.5 | 90 | 92.1 | 102.5 | 61.4 | 224.9 | 80.9 | 66.5 | 121.6 |
| 215 | 366.7 | 5578.5 | 4327 | 285.6 | 78.2 | 266 | 478.1 | 3071.2 | 1903.3 |
| 216 | 633.5 | 670 | 697.1 | 660.4 | 547 | 267.5 | 566.7 | 785.5 | 412.5 |
| 217 | 235.7 | 147.3 | 281.6 | 384 | 479.9 | 98.7 | 277.7 | 221.7 | 271.5 |
| 218 | 191.6 | 481.1 | 295.1 | 384 | 112.2 | 335.8 | 274 | 687.3 | 319.7 |
| 220 | 74 | 79.4 | 131.9 | 86.9 | 109.2 | 139.9 | 74.3 | 78.7 | 98.2 |
| 221 | 739.7 | 775 | 1236 | 738.2 | 1516.5 | 159.5 | 796.8 | 459.3 | 439.4 |
| 223 | 226.1 | 262.3 | 230.6 | 220.4 | 235.4 | 419.6 | 210.6 | 191.4 | 360.2 |
| 227 | 784.7 | 236.7 | 712.8 | 3864 | 4971.9 | 50.2 | 2112.1 | 483.2 | 1731 |
| 228 | 427.4 | 369.6 | 410.7 | 756.3 | 119 | 453 | 308.8 | 321.2 | 777.9 |
| 229 | 121.4 | 178.2 | 180.7 | 386.6 | 270.9 | 497.6 | 489 | 353.6 | 172.9 |
| 230 | 85 | 63.3 | 105.6 | 210.3 | 1243.7 | 40.9 | 331.4 | 106.7 | 325.5 |
| 231 | 337.9 | 417.5 | 650 | 305 | 129.2 | 163.1 | 486.4 | 499 | 193.8 |
| 232 | 213 | 116.6 | 3960.5 | 604.6 | 1673.4 | 54.4 | 4508.4 | 185.8 | 2113.5 |
| 233 | 2564 | 1822.6 | 6196.9 | 2781.4 | 3667.3 | 1118.9 | 3084 | 6379.7 | 4116.8 |
| 235 | 137.6 | 63.4 | 580.8 | 361.2 | 1679.5 | 92.8 | 833 | 86.2 | 2441.7 |
| 236 | 160.2 | 120 | 182.2 | 264.3 | 417.6 | 254.8 | 288.4 | 125.5 | 310.6 |
| 237 | 2392.5 | 1737.2 | 1778.8 | 1851.2 | 3102.3 | 638.8 | 2558.1 | 2048.7 | 1204.1 |
| 238 | 934.8 | 1575.1 | 1087.9 | 1078.8 | 215.5 | 179.1 | 1369.6 | 2083.3 | 807.8 |
| 239 | 256.3 | 59.9 | 259.2 | 442 | 208.4 | 101.6 | 275.9 | 58.6 | 485 |
| 240 | 316.9 | 27.3 | 330.2 | 381.2 | 683 | 52.8 | 381.6 | 41.4 | 575.1 |
| 241 | 602.7 | 36.7 | 562.8 | 985.9 | 886.1 | 83.4 | 734.2 | 126.7 | 1214 |
| 242 | 2714.7 | 325 | 2278 | 12129 | 22000.8 | 874.8 | 2544.9 | 845.1 | 6760 |
| 243 | 477.1 | 168.4 | 373 | 453.4 | 7356.1 | 182.8 | 441.2 | 223 | 259.3 |
| 244 | 137.2 | 198.3 | 172.5 | 137.8 | 308.4 | 111.1 | 215.7 | 213.9 | 147.9 |
| 246 | 262 | 306.4 | 301.9 | 426.2 | 407.7 | 346.6 | 609.8 | 874.2 | 145.9 |
| 247 | 117.5 | 142.6 | 77 | 156.9 | 119.1 | 289.1 | 120.2 | 120.9 | 213.4 |
| 248 | 216.4 | 124.1 | 74.2 | 115.8 | 92.4 | 107.5 | 317.2 | 126.7 | 106.4 |
| 249 | 180 | 341.2 | 320.1 | 176.7 | 185.5 | 885.1 | 399.6 | 131.7 | 791.8 |
| 251 | 63.8 | 107.9 | 106.3 | 84.5 | 742.7 | 44.5 | 117.5 | 94.5 | 111.7 |
| 253 | 190.7 | 244.8 | 204.4 | 375.3 | 374.5 | 218.4 | 376.5 | 486.5 | 269.6 |
| 254 | 145.4 | 1957.1 | 1159.5 | 243.2 | 123.7 | 228.2 | 1365 | 142.3 | 312.9 |
| 255 | 170.9 | 82.9 | 51.9 | 379.1 | 1787.5 | 1107.5 | 2481.4 | 91.2 | 318.4 |
| 256 | 517.8 | 132.4 | 995.4 | 353.1 | 1340.6 | 331.8 | 499.8 | 141.8 | 3605.8 |
| 257 | 124.3 | 174.8 | 165.9 | 97.2 | 172.3 | 54 | 209.3 | 115.4 | 173.8 |
| 258 | 24 | 1.2 | 253.4 | 53.4 | 345.6 | 104.4 | 131.7 | 3.9 | 456.5 |
| 259 | 692.2 | 65.2 | 512.5 | 236.2 | 422.2 | 1.2 | 669.1 | 79.7 | 638.4 |
| 260 | 153.5 | 168.4 | 123.3 | 295.4 | 151.6 | 561.5 | 224.9 | 163.9 | 266.2 |
| 261 | 197.8 | 221.1 | 313.1 | 301.5 | 77.8 | 119.5 | 496.8 | 1094.7 | 301.6 |
| 263 | 698.9 | 553.8 | 407.2 | 370.6 | 1231.9 | 141.3 | 387.3 | 692.4 | 333.4 |
| 263 | 135.5 | 78.4 | 109.7 | 225.9 | 1211 | 201.2 | 434.5 | 96.2 | 404.4 |
| 265 | 362.9 | 618.8 | 519.4 | 342.3 | 102 | 258.8 | 178.2 | 477.2 | 588.4 |
| 266 | 246.8 | 201.9 | 307.4 | 607.3 | 257.6 | 820.3 | 300.7 | 537.1 | 367 |
| 256 | 115.8 | 100.6 | 138.3 | 134.8 | 325.1 | 134.2 | 161.2 | 75.9 | 165.2 |
| 268 | 209.2 | 366.9 | 653.7 | 922.5 | 10 | 480.6 | 333.1 | 299.5 | 775.9 |
| 269 | 40.7 | 48.5 | 42.3 | 72.2 | 126 | 90.5 | 30 | 60.5 | 91.4 |
| 270 | 466.8 | 148.2 | 169.3 | 215.5 | 180.7 | 290.2 | 237 | 153.1 | 262.6 |
| 271 | 340.4 | 250.6 | 292 | 363.1 | 191.9 | 147.4 | 231.1 | 338.8 | 278.4 |
| 272 | 419.7 | 600.7 | 550.3 | 549.6 | 590.7 | 925.3 | 506 | 506.9 | 675.1 |
| 273 | 1329.6 | 4064.8 | 5723.5 | 4200.8 | 53.9 | 141.9 | 2361.5 | 2682.8 | 4782.9 |
| 274 | 572.9 | 159.6 | 459.6 | 777.2 | 2112.5 | 590 | 1292.6 | 264.9 | 670.4 |
| 275 | 400.8 | 151.3 | 339.1 | 398 | 1769 | 221.5 | 415.8 | 329.2 | 264.8 |
| 276 | 1260.7 | 304 | 1311.2 | 5788.9 | 9405.7 | 142.2 | 3231.8 | 599.6 | 2504.9 |
| 277 | 175.4 | 164.3 | 192.2 | 231.9 | 150.5 | 254.7 | 152.2 | 197.2 | 281.6 |
| 278 | 1103 | 87.3 | 544.7 | 209.6 | 729.1 | 38.2 | 801.4 | 62.2 | 875.4 |
| 279 | 1853 | 3010.3 | 1676.6 | 3236.4 | 131.7 | 425.7 | 2072.3 | 2745.7 | 1987 |
| 280 | 2108.7 | 4444.5 | 2655.3 | 3526 | 338.9 | 391.3 | 2886.5 | 4540.8 | 2685.8 |
| 281 | 18.4 | 25 | 53.6 | 118.3 | 67.5 | 103.2 | 129.1 | 36 | 49.1 |
| 282 | 208.4 | 189.9 | 229.3 | 225.9 | 218 | 274.6 | 281.5 | 269.8 | 574.2 |
| 283 | 226.2 | 239 | 236.5 | 269.1 | 179.9 | 647.8 | 210.9 | 202.5 | 338.1 |
| 284 | 76.5 | 83 | 85.5 | 84.8 | 61.1 | 154.1 | 83.4 | 51.9 | 87.9 |
| 285 | 83.4 | 81.8 | 98.2 | 109.9 | 70.2 | 153.3 | 87 | 104.4 | 126.6 |
| 286 | 2043.9 | 638.5 | 1891.2 | 121.4 | 602.8 | 343.8 | 417.5 | 688.5 | 824.4 |
| 287 | 102.2 | 122.8 | 119.2 | 106.4 | 113.9 | 133.5 | 95.5 | 144.2 | 149.6 |
| 288 | 142 | 147.4 | 138.8 | 152.9 | 154.3 | 269 | 139.9 | 140.5 | 203.7 |
| 289 | 673.8 | 1.2 | 569.8 | 199.4 | 1260.8 | 269.4 | 831.4 | 65.9 | 2672.1 |
| 291 | 209.6 | 44 | 112.8 | 181.3 | 341.7 | 44 | 78.9 | 99.5 | 126.6 |
| 292 | 62.9 | 40.3 | 181.8 | 49.2 | 103.4 | 47.8 | 786.4 | 36.9 | 412.2 |
| 293 | 489.3 | 121.1 | 95.1 | 72.6 | 52.1 | 99.7 | 409.7 | 50.8 | 113 |
| 295 | 527.5 | 128.5 | 168 | 466.6 | 768.9 | 354.3 | 354.7 | 222.9 | 256.1 |
| 296 | 773.6 | 924.1 | 1329.9 | 843.8 | 1063 | 956.8 | 1070.2 | 873.2 | 688.9 |
| 297 | 52 | 51.9 | 85.2 | 60.1 | 2284.1 | 95.4 | 70.8 | 52.2 | 96.9 |
| 298 | 295.2 | 198.2 | 300.3 | 295.1 | 502.3 | 161.6 | 292.8 | 372.6 | 290 |
| 299 | 1170.6 | 1365.1 | 561.9 | 926.9 | 160.3 | 431.4 | 1139.9 | 604 | 851.1 |
| 300 | 79.1 | 638.7 | 458 | 158.4 | 272.1 | 104.6 | 617.9 | 383.6 | 205.3 |
| 301 | 1366.1 | 435.2 | 1418.5 | 798.3 | 317.5 | 423.3 | 664.2 | 750.6 | 2119.8 |
| 302 | 14.8 | 21.6 | 21.1 | 13.6 | 121.5 | 39.5 | 24.7 | 9.5 | 34.9 |
| 303 | 1272.6 | 1149.6 | 761.8 | 834.5 | 159.9 | 477.7 | 449.7 | 1072.6 | 432.1 |
| 304 | 1151.3 | 128.6 | 230.5 | 335.2 | 454.3 | 186.6 | 1221.7 | 235 | 379.7 |
| 305 | 151.1 | 238.9 | 140.3 | 950.2 | 110.9 | 1077 | 1043.9 | 166.7 | 211.5 |
| 306 | 136.4 | 144.5 | 117.6 | 155.2 | 192.6 | 291.2 | 118.6 | 150.5 | 228.4 |
| 307 | 132.8 | 177.7 | 207.1 | 196.3 | 120 | 249.1 | 112.4 | 122.8 | 281.5 |
| 308 | 2569.4 | 1758.7 | 2241.2 | 2859.3 | 230.6 | 2770.2 | 677.2 | 2894.9 | 1090.1 |
| 310 | 980 | 334 | 456.4 | 390 | 114.5 | 278.1 | 997.8 | 654.8 | 472.6 |
| 311 | 142.6 | 73.1 | 84.3 | 121.4 | 78.4 | 146.9 | 148.3 | 200.6 | 115.7 |
| 312 | 2560.4 | 57.2 | 426.8 | 89.2 | 18.4 | 574.8 | 506.6 | 402.8 | 956.5 |
| 313 | 209.5 | 119.1 | 121.2 | 222.7 | 91.7 | 201.4 | 478.6 | 92.9 | 117.2 |
| 314 | 158.8 | 162.7 | 249.8 | 188.5 | 309.4 | 89.2 | 547.1 | 122.9 | 576.3 |
| 315 | 702.8 | 557.9 | 900 | 546.6 | 104 | 247.6 | 529.5 | 657.3 | 404.1 |
| 316 | 250.6 | 332.6 | 259.8 | 311.9 | 69.6 | 518.6 | 460.2 | 314.7 | 248.1 |
| 317 | 150.5 | 169.2 | 177 | 177.5 | 133.8 | 233 | 171.7 | 173.6 | 261.6 |
| 318 | 40.7 | 117.2 | 213.8 | 44.5 | 47.3 | 18.6 | 57.8 | 59.8 | 9.1 |
| 319 | 309.7 | 173 | 162.4 | 217 | 97.8 | 1038.4 | 828.1 | 117.5 | 167.2 |
| 320 | 822.5 | 511 | 664.1 | 815.9 | 185 | 371.3 | 845 | 592.1 | 437.2 |
| 321 | 629.1 | 258.6 | 321.1 | 511.8 | 309.4 | 452.1 | 355 | 573.3 | 321.3 |
| 322 | 195.9 | 274 | 200.6 | 228.2 | 502.2 | 565.2 | 318 | 241 | 250.5 |
| 323 | 5483.1 | 3828.6 | 3464.5 | 1733.4 | 233.8 | 941.9 | 1329.5 | 2376 | 2289.1 |
| 324 | 224.9 | 61 | 44.8 | 85.4 | 32 | 56.6 | 246 | 103.9 | 70.2 |
| 325 | 342.8 | 379 | 339.3 | 282.9 | 230.2 | 339.8 | 313.3 | 331.3 | 331 |
| 326 | 2895.3 | 6732.3 | 6959.5 | 716.8 | 385.8 | 689.6 | 1354.3 | 3462.4 | 810.2 |
| 327 | 14 | 26.8 | 9 | 107.3 | 745.3 | 31.8 | 92.3 | 30.5 | 40.5 |
| 328 | 281.4 | 393 | 463 | 538.5 | 44.8 | 160.9 | 160.6 | 240 | 510.8 |
| 329 | 83.3 | 80 | 72.1 | 51.7 | 315.4 | 197.3 | 209.5 | 65.5 | 97.5 |
| 330 | 51.4 | 40.9 | 62.5 | 38.8 | 64.6 | 86 | 49.8 | 45.3 | 75.4 |
| 331 | 310.9 | 265.9 | 292.9 | 290.5 | 301.2 | 1151 | 377.7 | 262.6 | 363.2 |
| 333 | 770.8 | 635.6 | 1012.3 | 910.6 | 190.7 | 762.8 | 346 | 908.1 | 711.7 |
| 334 | 207.8 | 219.4 | 166 | 215.4 | 137.5 | 112.8 | 565.2 | 135.4 | 170 |
| 335 | 155.6 | 80.9 | 114.5 | 131.9 | 90.7 | 718.1 | 215.7 | 922.8 | 155.9 |
| 336 | 340.7 | 427.2 | 563.8 | 689.1 | 96.3 | 436.7 | 487.1 | 782.5 | 499 |
| 337 | 2849 | 76.8 | 200.7 | 463 | 932.4 | 112.2 | 638.2 | 474.2 | 194.5 |
| 338 | 177.2 | 183.9 | 190.4 | 175.1 | 273.4 | 59.6 | 256.4 | 142.1 | 229.6 |
| 339 | 395.4 | 525.8 | 437.1 | 581 | 225 | 445.4 | 326.7 | 362.3 | 485.5 |
| 340 | 223.5 | 251.1 | 290.8 | 318.2 | 197.1 | 253.7 | 187.5 | 285.3 | 397.3 |
| 341 | 473 | 874 | 1273.4 | 721.4 | 508.7 | 1207.3 | 566.8 | 660.8 | 584.1 |
| 343 | 469.4 | 161.5 | 78.2 | 124.9 | 366 | 1807.9 | 1281 | 53.8 | 117.8 |
| 344 | 1783.5 | 1064.1 | 1156.4 | 1751.4 | 281.3 | 986.5 | 1814.7 | 1291.3 | 1259.5 |
| 345 | 244.8 | 232.7 | 258.2 | 265.4 | 279 | 383.5 | 225.4 | 192.1 | 278.1 |
| 347 | 939.3 | 1308.9 | 2012 | 2968.2 | 324.4 | 1367.9 | 2442.7 | 1031.3 | 2634.6 |
| 348 | 1619 | 2746.3 | 3836 | 4352.3 | 628.4 | 2022.4 | 5951.2 | 4142.1 | 3535.5 |
| 349 | 208.6 | 294.7 | 249.4 | 334.4 | 413.9 | 154.9 | 222.4 | 262.8 | 343 |
| 350 | 265 | 151.9 | 221.4 | 354.3 | 1016.4 | 1.2 | 367.5 | 179 | 283.6 |
| 351 | 121.2 | 184 | 512.2 | 66.7 | 230.2 | 220.7 | 229.7 | 69.7 | 320.1 |
| 352 | 468.7 | 405.1 | 432.1 | 461.6 | 124.7 | 253.5 | 262.2 | 439 | 377.6 |
| 353 | 422.8 | 154.1 | 375.8 | 272.6 | 206.3 | 272.5 | 306.9 | 342 | 275.3 |

3c

| SEQ ID | | | | | | | | | |
|---|---|---|---|---|---|---|---|---|---|
| NO: | 830TT | 831TT | 832TT | 834TT | 835TT | 836TT | 837TT | 838TT | 839TT |
| 354 | 1607.7 | 1269.4 | 69.2 | 410.9 | 2189.2 | 23.1 | 352.6 | 432.9 | 560.6 |
| 355 | 1226.2 | 9155.4 | 818.2 | 3259.7 | 4192.9 | 60.2 | 6955.8 | 2712.6 | 387 |
| 356 | 589.5 | 420.2 | 584 | 481.7 | 485.2 | 628.1 | 781.8 | 356.3 | 432.6 |
| 357 | 639.1 | 496.4 | 606.3 | 873.1 | 453.3 | 762.3 | 556.9 | 747.8 | 483.8 |
| 358 | 1141.1 | 1537.2 | 2093.3 | 1332.4 | 1450.6 | 785 | 1727.4 | 1490.9 | 867.6 |
| 359 | 410.8 | 324.8 | 302.5 | 275.6 | 347.4 | 372 | 401.6 | 274.5 | 352.8 |
| 362 | 433.7 | 1188.9 | 809.4 | 714.8 | 722 | 536.8 | 1286.6 | 790.9 | 408.6 |
| 360 | 355.3 | 785.8 | 548.6 | 473.7 | 527.2 | 237.8 | 648 | 589.2 | 258.9 |
| 361 | 669.1 | 117.2 | 502.4 | 332.7 | 153.1 | 491.8 | 673.8 | 155.9 | 634.6 |
| 363 | 624.8 | 516.7 | 452.9 | 386.1 | 575.4 | 348.2 | 555.6 | 423.3 | 578.6 |
| 1 | 681.6 | 1339.4 | 926.7 | 1627.5 | 1378.3 | 825.9 | 1180.5 | 1556.8 | 483 |
| 2 | 2308.2 | 2517.8 | 2273.1 | 5347 | 1263.4 | 2813.7 | 1449.6 | 2931.3 | 2339.6 |
| 7 | 760.1 | 396.2 | 691.3 | 1209.2 | 602.6 | 682.5 | 797.8 | 924.6 | 504.6 |
| 8 | 1540.3 | 559.2 | 932.1 | 520.1 | 496.7 | 1011.1 | 563.4 | 319.8 | 942.6 |
| 9 | 2980.9 | 1665.3 | 5198.9 | 2703.9 | 1212.7 | 4689.7 | 7367.2 | 4021.7 | 2722.5 |
| 10 | 122.4 | 197.5 | 65.2 | 110.5 | 139.5 | 59.4 | 99.3 | 137.7 | 236.6 |
| 11 | 376.8 | 703.1 | 345.6 | 651.8 | 578.7 | 208.4 | 539.6 | 862.8 | 174 |
| 13 | 181.2 | 792.6 | 515 | 259.6 | 570.1 | 291.6 | 711.6 | 596.7 | 310.5 |
| 14 | 618.3 | 2196.3 | 1802 | 1423.9 | 1281.3 | 1502.7 | 2410.1 | 2087.7 | 533.5 |
| 15 | 807.1 | 1589.6 | 1001.5 | 828.3 | 1241.5 | 307.4 | 2913.4 | 4498.6 | 625.1 |
| 16 | 1484.5 | 3932 | 1622.5 | 2238.6 | 3413.6 | 1419.6 | 2274.4 | 2625.1 | 831.6 |
| 17 | 699.7 | 876.3 | 1400.3 | 1300.9 | 988.9 | 1281 | 1049.5 | 2078.4 | 694.1 |
| 19 | 482.6 | 465.6 | 2749.2 | 461.1 | 810 | 290.3 | 1716.7 | 1582.7 | 1076.2 |
| 20 | 84 | 450.8 | 263.1 | 290.5 | 360 | 1.1 | 182.4 | 324.9 | 165.7 |
| 21 | 91.3 | 3467.2 | 514.9 | 1814.1 | 3225.9 | 499.2 | 2094.7 | 1840.3 | 181.3 |
| 22 | 3156.1 | 4671.9 | 5203.4 | 6611.6 | 3435 | 2468.1 | 9279.3 | 6745.6 | 4447.3 |
| 23 | 495.3 | 1234.6 | 1083.4 | 798.1 | 1519.6 | 356.2 | 1191.8 | 2950.2 | 871.6 |
| 24 | 274.4 | 317.3 | 405.7 | 185.5 | 432.2 | 235.1 | 795.2 | 871.3 | 137.7 |
| 26 | 2752.2 | 4302.1 | 8189.5 | 1864.3 | 3917.4 | 2490.7 | 6974 | 5535.2 | 4706 |
| 27 | 424.6 | 749.9 | 1258.8 | 1611.9 | 871.3 | 505 | 1476.7 | 1146.7 | 506.1 |
| 29 | 165.7 | 162.7 | 75.4 | 90.5 | 104.2 | 94.3 | 114.4 | 146.2 | 101 |
| 30 | 312.4 | 592.5 | 409.5 | 348 | 418.1 | 136.7 | 1284.6 | 1307.6 | 408.1 |
| 31 | 331.7 | 12536.5 | 1834 | 9042.7 | 16967 | 303.8 | 5146.5 | 6843.3 | 352.9 |
| 33 | 1256.2 | 4507.9 | 1474.3 | 2328.6 | 4981.8 | 451.7 | 4542.5 | 11875.5 | 544.7 |
| 34 | 2831.9 | 492 | 3213.2 | 870 | 569.7 | 1873.2 | 2278.6 | 454.6 | 2785.1 |
| 35 | 1217 | 1751.1 | 260.4 | 933.6 | 1418.4 | 120.2 | 423.2 | 768.6 | 680.3 |
| 36 | 145.6 | 258.1 | 974.8 | 3626.3 | 913.3 | 524.5 | 893.8 | 1391.4 | 185.2 |
| 37 | 286.6 | 268.9 | 312.8 | 203.1 | 264.8 | 203 | 424.3 | 264.8 | 270.4 |
| 38 | 709.7 | 3086.6 | 1199.9 | 882.2 | 1931.9 | 384.4 | 1810.3 | 7524 | 348.4 |
| 40 | 603.3 | 849.4 | 466.7 | 631.9 | 695.6 | 357.4 | 654.4 | 633.1 | 633.2 |
| 41 | 285.5 | 513.6 | 628.4 | 721.9 | 2482 | 1004.7 | 621.2 | 2126 | 360.3 |
| 42 | 229.9 | 548.9 | 402.2 | 516.1 | 450.5 | 519.8 | 332.6 | 612.9 | 222.9 |
| 43 | 390.1 | 489.1 | 363.3 | 192.2 | 399.6 | 388.1 | 369 | 222.3 | 314.1 |
| 44 | 652.8 | 952.5 | 925.3 | 1044.2 | 930.7 | 784.2 | 962.5 | 1223.4 | 468 |
| 45 | 691.2 | 1619.8 | 791.5 | 1433.2 | 1616.2 | 618.5 | 1030.5 | 1531.9 | 335.2 |
| 46 | 351.6 | 412.4 | 339 | 330.5 | 453.3 | 276.5 | 345.7 | 346.9 | 376.6 |
| 47 | 256.3 | 423.2 | 349.8 | 448.9 | 546.2 | 138.6 | 305.9 | 635.7 | 188.2 |
| 48 | 297.1 | 112.1 | 708.1 | 397.5 | 367.9 | 134.4 | 1885.5 | 680.1 | 1204.7 |
| 49 | 497.2 | 2981.6 | 1179.9 | 712 | 5248.7 | 553.9 | 1047.2 | 640.1 | 381.8 |
| 50 | 350.3 | 659.2 | 627.4 | 427.2 | 665.1 | 230.3 | 1754.6 | 2654 | 228.2 |
| 51 | 80.2 | 1018.5 | 175.1 | 392.4 | 669.4 | 374.5 | 326.8 | 448.4 | 77.7 |
| 52 | 219.7 | 261.6 | 189.5 | 266.9 | 275.7 | 214.6 | 245.4 | 224.4 | 208.5 |
| 53 | 97.5 | 1385.3 | 1668.8 | 2690.6 | 1207.6 | 509 | 1096 | 2281.1 | 132.5 |
| 54 | 401.9 | 1101.6 | 1148.7 | 1527.2 | 880.3 | 1550.3 | 682.6 | 1648.3 | 318.8 |
| 55 | 87.2 | 79.5 | 120.6 | 81 | 64 | 126 | 101.5 | 117.8 | 130.8 |
| 56 | 41.5 | 356.3 | 290.8 | 220 | 321.6 | 255.3 | 116.9 | 178.9 | 114.6 |
| 57 | 4709.8 | 826 | 3670.5 | 13995.1 | 2735.5 | 1208.7 | 2495.3 | 8987.2 | 1600.1 |
| 58 | 5493.8 | 942.8 | 3824 | 13347.2 | 3431.8 | 1473.6 | 2604.6 | 9793.3 | 1896.9 |
| 59 | 990.8 | 4570.9 | 2467.2 | 2820.8 | 3584.1 | 1578.8 | 2600.2 | 2511.9 | 1043.9 |
| 60 | 86.6 | 409 | 328.3 | 697.7 | 313.2 | 195.4 | 394 | 769.5 | 205.8 |
| 61 | 148.6 | 102.4 | 113.5 | 119.1 | 96.3 | 180.5 | 151.5 | 144.5 | 90.7 |
| 62 | 2552.4 | 3419 | 2087.8 | 1947.4 | 3982.4 | 632.7 | 4686.3 | 1552 | 893.8 |
| 63 | 138.1 | 500.7 | 504.9 | 621.5 | 477.8 | 416.2 | 765.6 | 623.8 | 200.9 |
| 64 | 194.3 | 430.2 | 1152 | 334.2 | 1238.6 | 157.1 | 225.5 | 301.4 | 184.8 |
| 65 | 119.3 | 275.4 | 393.9 | 220.9 | 330.6 | 146.6 | 362.6 | 472.9 | 192.6 |
| 66 | 644.5 | 1716.5 | 799.8 | 2089.9 | 1882.3 | 860.9 | 884.9 | 1790.8 | 494.1 |
| 67 | 33664.7 | 18698 | 25385.3 | 29495.1 | 22746.1 | 32326.6 | 35830.4 | 25673.3 | 30440.8 |
| 68 | 4863.4 | 757.4 | 639.2 | 500.3 | 628.5 | 1067 | 877.5 | 537.2 | 2729.1 |
| 69 | 7538.6 | 1746.3 | 2633.5 | 2161.4 | 1446.6 | 3285.4 | 3619.9 | 2224.2 | 3873.7 |
| 70 | 1167.7 | 4005.5 | 2775 | 4480.9 | 5935.2 | 2888.4 | 2408.7 | 3524.2 | 1112.2 |
| 71 | 331.3 | 7296.2 | 3308.3 | 4722.7 | 6620.9 | 641.7 | 3323 | 7752.1 | 521.9 |
| 72 | 867.2 | 2722 | 587.7 | 1727.1 | 2480.6 | 715.1 | 1071.1 | 2441.2 | 729.3 |
| 73 | 248.7 | 702.4 | 513.9 | 998.3 | 674.5 | 351.8 | 560.2 | 646.8 | 291.3 |
| 75 | 191.9 | 299.8 | 1021.2 | 2627.9 | 481 | 184.1 | 684.5 | 3040.4 | 241.4 |
| 76 | 602.9 | 419.6 | 424.1 | 687.6 | 576.5 | 1929.4 | 374.1 | 1713.5 | 249.7 |
| 77 | 3969.7 | 1046.9 | 2803 | 1502.3 | 1123.7 | 3525.2 | 3967.9 | 610.4 | 3028 |
| 78 | 461 | 260.7 | 681.4 | 434.3 | 255.4 | 719 | 658.2 | 440.9 | 425.5 |
| 79 | 112.1 | 359.7 | 118.8 | 269.2 | 354.3 | 241.7 | 238 | 391.9 | 129.7 |
| 80 | 211.4 | 800.8 | 565.5 | 1265 | 877.2 | 479.3 | 445.8 | 1163.2 | 181.6 |
| 81 | 381.4 | 8963.9 | 1038.9 | 7150.5 | 8082.3 | 289.1 | 2966.6 | 5268.9 | 339.8 |
| 82 | 204.4 | 189.8 | 246.1 | 203.2 | 216.8 | 260.9 | 253.2 | 152.4 | 345.8 |
| 84 | 167 | 297.3 | 276.3 | 381.1 | 417.7 | 274.7 | 303.1 | 497.5 | 238.9 |
| 85 | 186.4 | 1174.1 | 201.5 | 1066.1 | 1674.8 | 143.6 | 434.1 | 306 | 203.8 |
| 86 | 75.7 | 748.2 | 119 | 174.2 | 654.4 | 84.9 | 219.2 | 164.9 | 102.9 |
| 87 | 252.7 | 2338.9 | 668.2 | 445 | 1007.4 | 249.1 | 1199.6 | 589.5 | 215 |
| 88 | 6167.9 | 470.3 | 4262.6 | 1023.8 | 548.1 | 5577.9 | 4604.6 | 683.8 | 3916.7 |
| 89 | 267 | 506.7 | 193 | 233.1 | 541.1 | 192.3 | 266.6 | 262.9 | 321.8 |
| 90 | 190.7 | 110.5 | 214.3 | 244.9 | 280 | 124.7 | 260 | 290 | 113.5 |
| 91 | 7102.8 | 1126.2 | 1543.8 | 6389.7 | 2050.8 | 529.2 | 760.6 | 7087.2 | 1108.2 |
| 92 | 1861.9 | 9980.6 | 9744 | 7280.9 | 5486.5 | 7913.2 | 7006.7 | 5412 | 2498.8 |
| 93 | 163.2 | 108.9 | 245.5 | 157.5 | 112.4 | 254.2 | 250.4 | 119 | 193 |
| 94 | 839.4 | 577 | 1488.5 | 1006.1 | 405.5 | 1082.5 | 1126.2 | 964.8 | 634.9 |
| 95 | 515.4 | 1234.6 | 807.9 | 454 | 959.8 | 864.4 | 770.5 | 494.4 | 662.2 |
| 96 | 144.9 | 212.1 | 199 | 351.5 | 306.3 | 223.8 | 227.7 | 302.5 | 175 |
| 97 | 130.8 | 471.3 | 333.4 | 484 | 448.6 | 329.5 | 480.1 | 568.4 | 147.1 |
| 98 | 15.8 | 32.4 | 37.6 | 34.4 | 51.3 | 39 | 38.4 | 65.9 | 38.2 |
| 99 | 318.3 | 435.4 | 289.7 | 489.3 | 399.5 | 198.2 | 351.7 | 473.1 | 298 |
| 100 | 12916 | 51.7 | 13251.4 | 1990.7 | 423.3 | 4429.8 | 13164.2 | 230 | 5552.1 |
| 101 | 532.8 | 290.8 | 329.4 | 342.8 | 316.8 | 363.7 | 300.1 | 234.7 | 333.5 |
| 102 | 229.2 | 186.8 | 199.6 | 138.3 | 206.2 | 149.6 | 226.5 | 175.3 | 202.1 |
| 103 | 342.5 | 406.4 | 434 | 355.9 | 371.1 | 306.7 | 526.4 | 435.6 | 362.1 |
| 104 | 596.1 | 90.6 | 698.7 | 267.8 | 65.4 | 947.3 | 366 | 148.9 | 436.1 |
| 105 | 533.9 | 86.9 | 770.1 | 333.9 | 108.7 | 831.3 | 274.7 | 239.4 | 443.9 |
| 106 | 573.6 | 70.7 | 537.2 | 270.6 | 112.2 | 911.2 | 341.9 | 194.3 | 486.5 |
| 107 | 1027.4 | 294.7 | 183.4 | 222.5 | 716.1 | 250.8 | 263.1 | 280.6 | 335.9 |
| 108 | 241.6 | 145 | 283.6 | 211.1 | 169.4 | 333 | 276.2 | 235.5 | 308.9 |
| 109 | 1066.5 | 2807.4 | 2388.4 | 1135.5 | 1428.2 | 2931.4 | 1315.4 | 2683.7 | 95.3 |
| 110 | 2960.7 | 7199 | 6101.1 | 2633.5 | 3373.8 | 5614 | 5706.1 | 6310.8 | 130.7 |
| 111 | 2125.4 | 189.5 | 742.5 | 359.1 | 253 | 1180.3 | 925.2 | 140.9 | 1262.1 |
| 112 | 523.3 | 2050.6 | 1308.3 | 1693.4 | 1084.8 | 1386.3 | 718.3 | 1809.1 | 394.9 |
| 113 | 74.8 | 326 | 591.7 | 308.2 | 365.7 | 404.6 | 253 | 437.5 | 190.6 |
| 114 | 494.6 | 580.3 | 510.6 | 830.3 | 436.6 | 489.3 | 361.3 | 460.5 | 588.4 |
| 115 | 501.5 | 966.3 | 740.2 | 1215.5 | 1149 | 363.5 | 1225 | 1118.5 | 466.4 |
| 116 | 279 | 621.8 | 666.9 | 515.9 | 520.1 | 199.1 | 1091 | 891.9 | 310.3 |
| 117 | 1708.9 | 122.3 | 1731.3 | 467 | 162.6 | 817.7 | 1395.5 | 183.9 | 1888.5 |
| 118 | 136.1 | 129.6 | 287.9 | 133.8 | 97 | 154.8 | 231.6 | 230.9 | 391.1 |
| 119 | 250.9 | 375.2 | 298.4 | 289.2 | 272.3 | 298.3 | 279.5 | 171.8 | 367.9 |
| 120 | 135 | 98.5 | 266 | 117.9 | 142.2 | 119.8 | 265.8 | 210.2 | 170.8 |
| 121 | 925.3 | 1636.7 | 2341 | 5981.4 | 2305 | 1239.6 | 3217.7 | 4469.4 | 424.6 |
| 122 | 146.6 | 403.5 | 321.9 | 294.5 | 387.4 | 169.6 | 475.8 | 415.8 | 99.5 |
| 123 | 185.4 | 288.7 | 188.9 | 285.9 | 269.3 | 240.8 | 291.1 | 457.9 | 164 |
| 124 | 178.1 | 141 | 152.7 | 97.1 | 156.7 | 104.4 | 167.4 | 144.7 | 176.4 |
| 125 | 1161.1 | 1141.8 | 2587.8 | 5502.6 | 1399.3 | 689 | 1600.7 | 2696.8 | 1040.4 |
| 126 | 656.8 | 38.1 | 771.3 | 130.6 | 17.2 | 1187.1 | 477 | 64 | 905 |
| 127 | 102.9 | 244.7 | 132 | 189 | 183 | 113.8 | 209.9 | 130.6 | 133 |
| 128 | 387 | 69514.5 | 255.7 | 68429 | 281 | 269 | 317.9 | 214941 | 338.3 |
| 129 | 357 | 1983.4 | 2117 | 559.5 | 1969.4 | 382.4 | 899 | 1412 | 221.4 |
| 130 | 80.2 | 488.5 | 349.7 | 368.2 | 469.6 | 255.7 | 169.9 | 378.5 | 109 |
| 131 | 97.6 | 577.1 | 413.3 | 535.1 | 592.4 | 154 | 308.1 | 504.5 | 115.2 |
| 132 | 259 | 267.5 | 225.2 | 362.6 | 285.3 | 231.6 | 294.2 | 316.4 | 233.1 |
| 133 | 62 | 284.1 | 126.4 | 152.8 | 224.7 | 170.9 | 160.7 | 281.1 | 70.9 |
| 134 | 129.3 | 363.2 | 256.8 | 186.3 | 308.2 | 228.3 | 147.2 | 117.2 | 137.1 |
| 135 | 398.3 | 284.6 | 523.7 | 620.2 | 375.8 | 623.2 | 554.6 | 638.2 | 372.3 |
| 138 | 150.3 | 205.6 | 166.6 | 165.6 | 244.7 | 180.3 | 238.1 | 192.4 | 141.7 |
| 139 | 87.2 | 82.8 | 324.7 | 238 | 168 | 198.4 | 204.8 | 178.3 | 147.6 |
| 140 | 2117.8 | 107.3 | 1157 | 1151.6 | 68.3 | 2112.4 | 1062.3 | 199.7 | 2021.8 |
| 141 | 1371.7 | 677 | 2205.3 | 517.1 | 203.1 | 1460.2 | 1313.5 | 110 | 1344.6 |
| 144 | 487.8 | 6712.6 | 9651.1 | 13878.1 | 3393.4 | 9082.5 | 5985.5 | 22188.6 | 513.2 |
| 145 | 262 | 429.3 | 287.6 | 252.2 | 268.9 | 217 | 336.2 | 203.2 | 226.4 |
| 146 | 194.8 | 463.3 | 178.9 | 314.7 | 540.9 | 163.7 | 240.6 | 520.1 | 224.1 |
| 147 | 59.7 | 56.9 | 119.9 | 366.3 | 152 | 50.5 | 148.4 | 263.9 | 103.4 |
| 148 | 821.7 | 868.3 | 548.5 | 469.3 | 1125.9 | 334.8 | 1013.8 | 676.8 | 741 |
| 149 | 242.9 | 174.5 | 271.1 | 252.6 | 219.5 | 363.8 | 434.4 | 169 | 218.3 |
| 150 | 183.1 | 227.8 | 233.6 | 259.9 | 424.1 | 141.2 | 359.8 | 423 | 249.3 |
| 151 | 211.4 | 1131.6 | 570 | 576.6 | 580.9 | 369.8 | 475.6 | 262.8 | 327.6 |
| 153 | 81.4 | 122.6 | 274.3 | 196.9 | 115.5 | 453.6 | 156.4 | 725.7 | 123.9 |
| 154 | 687.5 | 4823.4 | 1405.3 | 5742.3 | 4211.6 | 942.8 | 2873.5 | 9112.2 | 480.4 |
| 155 | 139.2 | 1013.1 | 289.7 | 320.7 | 766.9 | 289.3 | 405.9 | 264.7 | 116.9 |
| 156 | 77.8 | 638.3 | 346.5 | 465.6 | 740.7 | 128.6 | 262.3 | 511.3 | 127.6 |
| 157 | 210.4 | 137.4 | 176.3 | 144 | 198 | 97.2 | 246 | 151.5 | 150.2 |
| 158 | 14.7 | 1191.6 | 243.3 | 631.9 | 852.7 | 303.1 | 733.1 | 924.1 | 12.1 |
| 159 | 3335.3 | 1313.5 | 2648.7 | 1400.3 | 1293.6 | 2577.5 | 2106.8 | 1174.1 | 3077.4 |
| 161 | 58.4 | 6972 | 2447.5 | 5870.8 | 5806.5 | 3314.6 | 521.9 | 4390.4 | 98.3 |
| 162 | 145 | 582 | 315.4 | 818.2 | 813.3 | 91.8 | 982.1 | 2165.6 | 316.3 |
| 164 | 75.4 | 1096.7 | 5139.7 | 1786.4 | 674.5 | 836.8 | 3086.4 | 577.7 | 211.6 |
| 166 | 5882.4 | 1758.7 | 3139.9 | 1274 | 662.7 | 3213.1 | 4469.7 | 1150.4 | 3810.8 |
| 167 | 2593.9 | 1006.1 | 2947.1 | 987 | 1134.4 | 2040.2 | 2587.3 | 1035.8 | 2569 |
| 168 | 1092.3 | 472.4 | 620.1 | 812.6 | 879.6 | 719.1 | 508.4 | 613 | 801.1 |
| 169 | 16935.6 | 11084.6 | 7798.3 | 11788.6 | 6525.4 | 4941.2 | 10219 | 13134.4 | 4408.7 |
| 170 | 640.4 | 2234.2 | 2081.1 | 2242.8 | 2170.8 | 2086 | 1389.5 | 2450 | 684.4 |
| 171 | 4002.8 | 860 | 1755.1 | 540.2 | 1265.9 | 373.5 | 3814.4 | 1969.2 | 2887.5 |
| 172 | 871.6 | 562.5 | 496.9 | 524.4 | 536.8 | 741.7 | 618.8 | 487.5 | 795.1 |
| 173 | 575.8 | 843.7 | 419.7 | 1448.7 | 916.9 | 512.9 | 1159.7 | 2172.2 | 361 |
| 176 | 217.5 | 1069.1 | 1369.4 | 1083.4 | 461.5 | 2385.1 | 823 | 271.7 | 71.1 |
| 177 | 712.3 | 592 | 497.4 | 495.9 | 559.8 | 651.8 | 489.3 | 372.4 | 574 |
| 178 | 333 | 1722 | 1370.5 | 2400 | 1863.3 | 1852.3 | 1112.4 | 2050.7 | 135.6 |
| 179 | 148.9 | 1165.2 | 914 | 1121.1 | 1438.7 | 84.3 | 739.1 | 1727.8 | 116.9 |
| 180 | 178 | 394.9 | 592.7 | 482.6 | 468.6 | 261.9 | 679.3 | 584.8 | 124.9 |
| 181 | 8559.6 | 3563.7 | 9515.2 | 5496.6 | 3150.6 | 6350.8 | 8535 | 5034.9 | 9024.4 |
| 182 | 303.1 | 363.2 | 607 | 437.8 | 284.5 | 355 | 547.5 | 405.8 | 347.6 |
| 183 | 463.4 | 743.1 | 1416.6 | 409.4 | 692.8 | 313.6 | 1066.3 | 1567.7 | 752.9 |
| 184 | 321.8 | 771.5 | 17054.7 | 1022.1 | 346 | 4736.3 | 714.2 | 527.3 | 221.3 |
| 185 | 858.5 | 7670.7 | 3976.3 | 3238.8 | 6074.4 | 967.8 | 6474.3 | 5307.2 | 1275.6 |
| 186 | 422.8 | 223.9 | 502 | 187.1 | 245.8 | 411.1 | 334.5 | 155.1 | 496.2 |
| 187 | 130.6 | 301.4 | 247.9 | 382.4 | 430.9 | 98 | 251.4 | 429.4 | 499.9 |
| 188 | 231.3 | 443.1 | 490.2 | 209.5 | 672.4 | 207.6 | 460.1 | 490.2 | 230.3 |
| 189 | 186.2 | 290.4 | 253.1 | 112 | 418.8 | 162.1 | 356.5 | 338.2 | 129.7 |
| 190 | 115.7 | 719.2 | 278 | 442.3 | 529.6 | 419.8 | 501.5 | 634 | 110.1 |
| 191 | 762.2 | 2944.3 | 1482.9 | 1491 | 1153.8 | 593.3 | 2253.3 | 2972.3 | 855.8 |
| 192 | 90.9 | 135.5 | 169.1 | 82.5 | 159.1 | 122.1 | 164.6 | 95.6 | 111.4 |
| 193 | 830.6 | 156.9 | 650.7 | 332 | 73.5 | 1566.3 | 778.2 | 246.1 | 749.5 |
| 194 | 116.9 | 307.8 | 210.6 | 367 | 243.7 | 248.1 | 220.6 | 242.1 | 121.1 |
| 195 | 167.1 | 213.3 | 230.4 | 93.7 | 205.8 | 349.5 | 194.4 | 147.8 | 226.8 |
| 196 | 8492.8 | 4271.5 | 4837.9 | 4245 | 4837.6 | 5613.6 | 5166.8 | 2741.2 | 7143.4 |
| 197 | 126 | 137.6 | 88 | 126 | 163.1 | 62.4 | 170 | 153.7 | 99.7 |
| 198 | 77.9 | 1237.6 | 107.3 | 1714.1 | 2069.7 | 160.7 | 379.3 | 3850.1 | 42.8 |
| 199 | 1975.9 | 15850.1 | 1067.1 | 3670.6 | 6331.3 | 92.9 | 10936.9 | 4209.3 | 574.9 |
| 200 | 442.4 | 367.6 | 806.6 | 641.4 | 731.8 | 272.8 | 852.3 | 608.7 | 378.9 |
| 201 | 1717.3 | 1466.3 | 62.7 | 409 | 2205.6 | 81.5 | 409.1 | 388.1 | 531.5 |
| 203 | 185.5 | 1325.5 | 1994.8 | 2659.6 | 1146.7 | 553 | 426.7 | 1650.6 | 294.4 |
| 204 | 640.5 | 373.8 | 990 | 1221.5 | 639.1 | 971.7 | 716.9 | 673.8 | 413.2 |
| 205 | 3638.5 | 3132.4 | 5021.1 | 4836.2 | 2548.8 | 4867.6 | 5773.1 | 5664.6 | 4500.1 |
| 206 | 4305.4 | 266.2 | 226.9 | 194.4 | 2367.5 | 186.1 | 1565.6 | 1933.1 | 13603.8 |
| 207 | 991.4 | 24.6 | 637.6 | 252.9 | 75.4 | 1349.4 | 407.4 | 119.4 | 589.5 |
| 208 | 589.9 | 1696 | 384.8 | 2423.4 | 990.6 | 458.5 | 465 | 2841.2 | 361.9 |
| 209 | 3044.4 | 1250.1 | 3110.3 | 684.4 | 220.2 | 3097.8 | 4613.7 | 225.9 | 2810 |
| 211 | 21702.9 | 163 | 6106.7 | 1726.7 | 272.3 | 20338.2 | 14214.4 | 218.1 | 13108.3 |
| 212 | 363.1 | 1146.1 | 984.2 | 1161.8 | 1648.5 | 1165.9 | 720.9 | 1062.1 | 324.3 |
| 213 | 117.5 | 85.6 | 93.1 | 80.5 | 140.7 | 104 | 160.1 | 103.1 | 133.2 |
| 215 | 1547.8 | 71 | 895.2 | 308.8 | 53.3 | 2847.9 | 790 | 201.2 | 863.8 |
| 216 | 466.2 | 184 | 743.2 | 255.8 | 157.4 | 648.4 | 522.1 | 231.6 | 528.4 |
| 217 | 253.9 | 1156.6 | 956.5 | 1388.7 | 916.7 | 655.7 | 993.9 | 1488 | 283.6 |
| 218 | 273.9 | 156.2 | 297.3 | 168.4 | 134.5 | 253.5 | 206.7 | 182.5 | 309 |
| 220 | 111.8 | 108 | 178.4 | 87.6 | 87.4 | 78.9 | 114.5 | 73.1 | 95 |
| 221 | 401.7 | 980.8 | 956.6 | 1765.3 | 1118.9 | 944.1 | 2190.1 | 2120.8 | 463.1 |
| 223 | 313.8 | 693.9 | 257 | 526.7 | 856.5 | 230.4 | 725.6 | 679.9 | 230.5 |
| 227 | 1309.4 | 2741.4 | 829.9 | 1455.7 | 2656.4 | 513.5 | 2644.7 | 7955 | 811.4 |
| 228 | 788.4 | 341.7 | 662.1 | 341 | 400 | 605.3 | 554.8 | 321.3 | 480.1 |
| 229 | 165.7 | 231.4 | 242.7 | 245.2 | 169.4 | 132.9 | 206.6 | 199.8 | 256.2 |
| 230 | 378.3 | 3159.3 | 602.9 | 2495.6 | 2807.6 | 427.9 | 1760.9 | 2607.2 | 253.5 |
| 231 | 179.7 | 503.8 | 1002.1 | 932.9 | 465.2 | 263.4 | 286.4 | 683.6 | 168.8 |
| 232 | 2120.5 | 2917.6 | 6467.5 | 1163.8 | 3285.8 | 1825.2 | 5213.4 | 4175.9 | 3969.4 |
| 233 | 3812.2 | 8994.9 | 10159.2 | 16687 | 8022.5 | 3071.4 | 10101.6 | 14509.8 | 5294.2 |
| 235 | 2787.4 | 609.3 | 1195.2 | 414.8 | 721.3 | 253.4 | 2159.8 | 921 | 1447.2 |
| 236 | 205.5 | 420.9 | 541.4 | 310.6 | 425.8 | 168.2 | 568.3 | 431.3 | 257.5 |
| 237 | 1075.9 | 1872.5 | 2343.1 | 2170.9 | 1947 | 1599.7 | 1714 | 1850.9 | 1457.9 |
| 238 | 595.7 | 686.4 | 1928.8 | 1067.3 | 636.7 | 1278.6 | 1084.7 | 907.4 | 839.5 |
| 239 | 408.9 | 910 | 1240.6 | 343.7 | 979.2 | 698.3 | 1207.4 | 1043.8 | 297.9 |
| 240 | 439.8 | 896.6 | 923.9 | 386.1 | 1012.3 | 671.2 | 1029.8 | 1706.7 | 346.5 |
| 241 | 1039.9 | 2207 | 2261 | 786.1 | 1746.5 | 1431 | 2286 | 2914.4 | 614.4 |
| 242 | 6785 | 25733 | 9423.8 | 18037.6 | 23053.8 | 1044.8 | 22442.7 | 27313.9 | 3641 |
| 243 | 172.2 | 719.2 | 374.5 | 427.7 | 727.7 | 198.8 | 793.6 | 730.7 | 379 |
| 244 | 117.1 | 158.2 | 359.4 | 1692.5 | 225.5 | 224.6 | 205.9 | 781.3 | 255.6 |
| 246 | 205.2 | 1124.9 | 754.6 | 1864.1 | 1124.1 | 998.2 | 993.1 | 2067 | 192.7 |
| 247 | 158.1 | 122.8 | 98.9 | 90.5 | 167.3 | 80.1 | 192 | 119.8 | 170.2 |
| 248 | 93.3 | 964 | 2395.2 | 4780.4 | 1534.5 | 1401.2 | 1160.4 | 3767.9 | 132.8 |
| 249 | 628.3 | 275.9 | 966.5 | 609.4 | 278.5 | 1711.8 | 1017 | 717.3 | 746.2 |
| 251 | 86.7 | 1115.8 | 467.4 | 572.2 | 1064.5 | 196 | 697.9 | 947.7 | 78.7 |
| 253 | 180.8 | 267.8 | 313.8 | 390.7 | 438.7 | 298.7 | 304.7 | 693.5 | 229.6 |
| 254 | 323.1 | 411.8 | 1816.5 | 1559.8 | 527.5 | 2075 | 1017.1 | 1776.1 | 350.4 |
| 255 | 307.7 | 1612.2 | 1295.2 | 2395.7 | 1944.5 | 1881.3 | 1003.5 | 2216.6 | 117.3 |
| 256 | 4984 | 885.5 | 1242.8 | 5330.6 | 1414.4 | 583.9 | 717.6 | 2463.5 | 988.4 |
| 257 | 229.6 | 347.5 | 146.2 | 392.4 | 283.4 | 105.2 | 231.5 | 331.8 | 93.6 |
| 258 | 467.5 | 1932.3 | 306.9 | 580.9 | 1669.9 | 50.7 | 1440.1 | 419.2 | 185.1 |
| 259 | 656.1 | 739.8 | 1239.2 | 816.5 | 649.5 | 213.6 | 1710.4 | 612.8 | 550.2 |
| 260 | 211.1 | 149.6 | 119.9 | 165.1 | 155.4 | 190.5 | 169.4 | 142.4 | 201.5 |
| 261 | 304.8 | 92.6 | 456.1 | 380.7 | 123.1 | 205.9 | 183.4 | 133.3 | 296.1 |
| 263 | 416.5 | 696.6 | 508.2 | 595.2 | 545.5 | 479.7 | 789.5 | 725.8 | 408.1 |
| 263 | 565.6 | 2856 | 535.6 | 2244.5 | 2669.9 | 321.7 | 1544.8 | 2324 | 280 |
| 265 | 470.5 | 69.8 | 209.8 | 116.1 | 97.9 | 338.5 | 324.8 | 100.9 | 325.4 |
| 266 | 256 | 195.2 | 345.7 | 246.5 | 313.5 | 349.5 | 292.8 | 235.5 | 347.8 |
| 256 | 173.1 | 291.4 | 341.1 | 568.6 | 490.5 | 185.1 | 300.4 | 785.2 | 162.7 |
| 268 | 527.3 | 595.7 | 2023.3 | 935.8 | 545 | 1146.6 | 808.3 | 526.4 | 721.4 |
| 269 | 32.6 | 266.5 | 71.6 | 170.1 | 494.5 | 52.6 | 298.3 | 240.8 | 65.9 |
| 270 | 279.9 | 197.9 | 274.9 | 183 | 205.6 | 244.4 | 305.9 | 202.5 | 162.7 |
| 271 | 242.7 | 1141.1 | 567 | 357.7 | 1086 | 274.5 | 625.4 | 1269.3 | 250.7 |
| 272 | 700.4 | 967.8 | 477.4 | 599.8 | 826.1 | 428.3 | 698 | 698.6 | 480 |
| 273 | 4697.9 | 211 | 2811.9 | 916.2 | 234.7 | 3500.5 | 4802.8 | 1550 | 1104.3 |
| 274 | 603.8 | 1411.8 | 1737.5 | 867.4 | 1091 | 321.9 | 1389.7 | 1216 | 664.2 |
| 275 | 225.9 | 3619.5 | 1297.8 | 806.9 | 2484.1 | 321.7 | 2165.1 | 1639.8 | 396.9 |
| 276 | 2732 | 4767.8 | 2036.4 | 2069.3 | 5010.2 | 844 | 6695.5 | 12351.9 | 1238.7 |
| 277 | 255.2 | 264.7 | 225.8 | 355.7 | 325.1 | 200.6 | 250.2 | 259 | 206.6 |
| 278 | 765.8 | 1291.5 | 1132.1 | 1008.7 | 1492.3 | 255.4 | 1550.7 | 1198.8 | 598.7 |
| 279 | 2233.9 | 1837 | 1527.8 | 2169.7 | 1934.2 | 2261.9 | 1828.4 | 2407.2 | 2843.7 |
| 280 | 3349.3 | 2489.9 | 1693.7 | 3130.8 | 2269.8 | 3147.5 | 2337 | 3287.7 | 2513.8 |
| 281 | 37.7 | 385.1 | 326.7 | 815.7 | 570.2 | 488.3 | 255.1 | 762.4 | 74 |
| 282 | 523 | 447 | 277.8 | 1273.6 | 749.8 | 235.4 | 421.2 | 3058.5 | 317.7 |
| 283 | 447.5 | 340.8 | 310 | 351.6 | 440.4 | 246.8 | 393 | 386.9 | 348.1 |
| 284 | 74.4 | 83 | 130.8 | 103.8 | 100.8 | 71.2 | 141.1 | 145.8 | 89.2 |
| 285 | 116 | 109.8 | 107.8 | 96.2 | 136.8 | 95 | 105.2 | 105.6 | 93.8 |
| 286 | 1056.7 | 63.5 | 148.9 | 68.8 | 54.6 | 307.6 | 176.7 | 60.5 | 344.1 |
| 287 | 126.9 | 81.8 | 136.5 | 115.2 | 128.5 | 110 | 153.7 | 95.5 | 99.4 |
| 288 | 172.6 | 145.5 | 166.4 | 146.9 | 195.1 | 144.4 | 165.3 | 173.2 | 184 |
| 289 | 2816.8 | 4208.5 | 1023.7 | 2660.2 | 4312.6 | 404.1 | 3191.6 | 3539 | 1715.5 |
| 291 | 120 | 338.3 | 132.7 | 186.1 | 234.4 | 129.8 | 203 | 425.5 | 113 |
| 292 | 473.6 | 820.1 | 4181.1 | 6680.4 | 826.4 | 110.4 | 8212.2 | 16919.5 | 977.5 |
| 293 | 120 | 1421.4 | 1229.9 | 592.8 | 1834.6 | 509 | 674.6 | 986.7 | 171.8 |
| 295 | 341.6 | 1948.4 | 1254.9 | 2043.1 | 2299.8 | 1064.4 | 1671.9 | 2245.9 | 229.1 |
| 296 | 552.7 | 1443.5 | 1644.1 | 1603.5 | 1908.8 | 822.2 | 1505.8 | 1432.6 | 753.8 |
| 297 | 45.3 | 90.8 | 94.6 | 50.3 | 139 | 53.5 | 88.5 | 154.3 | 116.4 |
| 298 | 440.1 | 517.5 | 501.4 | 487.3 | 470.9 | 471.4 | 489.6 | 506.6 | 219.8 |
| 299 | 725.6 | 819.4 | 1275.9 | 4386.6 | 3103.3 | 1663.7 | 910.5 | 4069.9 | 1147.8 |
| 300 | 177.4 | 1033.2 | 826.4 | 1230.7 | 1114.8 | 748.3 | 543.4 | 1306.1 | 250.1 |
| 301 | 2124.1 | 211.2 | 358.6 | 194.9 | 158 | 913.5 | 300.7 | 228.4 | 485.7 |
| 302 | 37.2 | 267 | 6.5 | 240.6 | 211.9 | 26.1 | 121.2 | 193.6 | 46.4 |
| 303 | 324.2 | 270.8 | 472.7 | 273.6 | 263 | 997.6 | 487 | 248.9 | 581.6 |
| 304 | 344.9 | 585.6 | 322.9 | 461.8 | 884.2 | 214.1 | 543 | 356.5 | 364.9 |
| 305 | 175.5 | 190.4 | 287.7 | 598.2 | 791.2 | 551.1 | 859.4 | 2550.8 | 158.7 |
| 306 | 189.2 | 803.1 | 191.1 | 557.8 | 620.8 | 163.1 | 322.9 | 218.6 | 195.4 |
| 307 | 302 | 238.1 | 145.1 | 553.9 | 295.1 | 159.8 | 280.9 | 449.1 | 226.3 |
| 308 | 1190.6 | 794.8 | 1165.2 | 705.2 | 515.1 | 1800.1 | 914.4 | 520.9 | 1641.8 |
| 310 | 362.3 | 134.8 | 505.7 | 103.4 | 125.4 | 229.5 | 318.3 | 62.5 | 326.1 |
| 311 | 62.7 | 499.8 | 263.8 | 932.2 | 246.8 | 162.7 | 224.5 | 1036.4 | 115.8 |
| 312 | 902.2 | 50.7 | 593.6 | 151.6 | 54.4 | 843.6 | 810.1 | 19.4 | 523.1 |
| 313 | 132.9 | 517.9 | 687.5 | 313.3 | 244.1 | 457.1 | 385.1 | 576.9 | 131.9 |
| 314 | 522.6 | 650.8 | 980.1 | 1264.1 | 1058 | 586.8 | 1856.2 | 1354.1 | 372 |
| 315 | 391.8 | 154.3 | 554.7 | 155.4 | 153.4 | 591.4 | 395.7 | 235.9 | 458 |
| 316 | 210.3 | 558.3 | 491 | 565.6 | 525.6 | 484.4 | 470.4 | 509 | 234 |
| 317 | 314.7 | 271 | 195.4 | 240.9 | 303.1 | 168.8 | 387.8 | 1026.2 | 214.7 |
| 318 | 45.9 | 383.2 | 425.9 | 527.9 | 428.5 | 97 | 264.8 | 364.3 | 127.7 |
| 319 | 174.9 | 528.4 | 259 | 454.7 | 535.4 | 302.5 | 225.5 | 319.9 | 223.3 |
| 320 | 572.9 | 159.3 | 518.2 | 278.5 | 211.4 | 569.8 | 518.8 | 239.3 | 464.9 |
| 321 | 307.2 | 232.7 | 332.4 | 169.5 | 222.3 | 311.8 | 367.9 | 203.1 | 354.6 |
| 322 | 164.7 | 350.9 | 214.6 | 345.1 | 354.5 | 264.7 | 257.5 | 318.3 | 243.3 |
| 323 | 2580.9 | 1349.5 | 3402.6 | 2592.2 | 1137.5 | 3939.8 | 2125.9 | 1848.5 | 1426.6 |
| 324 | 69 | 597.2 | 475.4 | 645.4 | 435.8 | 233.3 | 224 | 688.1 | 72.4 |
| 325 | 317.1 | 681.6 | 505.4 | 818.9 | 491.5 | 395.8 | 558.8 | 605.8 | 254.6 |
| 326 | 790 | 1838.6 | 2873.2 | 3607 | 2251.9 | 4068.7 | 6144 | 3552.4 | 3136 |
| 327 | 6.7 | 409.3 | 78.4 | 615.9 | 402.1 | 10 | 18.7 | 342.6 | 30.3 |
| 328 | 751.2 | 151 | 376.6 | 307 | 255.2 | 542.9 | 560.4 | 300.2 | 662.8 |
| 329 | 85.3 | 109.9 | 91 | 74 | 63 | 94.7 | 77.9 | 45.9 | 80.6 |
| 330 | 54.9 | 951 | 436.1 | 1119 | 408.8 | 55.7 | 678 | 877.4 | 141.4 |
| 331 | 403.9 | 382.1 | 215 | 302.1 | 371.7 | 380.3 | 325.4 | 324.5 | 332 |
| 333 | 571.4 | 156 | 462.8 | 160.5 | 140.1 | 1058.8 | 443.4 | 150.5 | 603.1 |
| 334 | 195.4 | 500.9 | 1027.6 | 250.9 | 655 | 196.6 | 332.8 | 432.2 | 161.6 |
| 335 | 155.1 | 109.1 | 732.5 | 572.2 | 165.5 | 62 | 194.8 | 923.7 | 127.6 |
| 336 | 668 | 210.4 | 480.1 | 280.3 | 175.5 | 389.2 | 344.2 | 252.7 | 445.1 |
| 337 | 197.1 | 220.6 | 207.5 | 266.7 | 387.8 | 309.2 | 374 | 240.3 | 256.6 |
| 338 | 217.2 | 890.9 | 464.6 | 1427.6 | 896.6 | 189.4 | 1039 | 1728.1 | 231.7 |
| 339 | 377 | 346.8 | 345.1 | 332.7 | 324.7 | 435.1 | 457.4 | 277.5 | 454.9 |
| 340 | 330.6 | 95874.2 | 237.5 | 123339.8 | 92245.2 | 222.4 | 696.6 | 74884.9 | 304.2 |
| 341 | 657.2 | 434.5 | 521.8 | 461 | 442.6 | 785.8 | 552.9 | 485.6 | 713.7 |
| 343 | 109.4 | 4793.6 | 207.9 | 601.9 | 2590 | 773.6 | 1138 | 1171.9 | 57.1 |
| 344 | 1167 | 249.7 | 893.9 | 545.2 | 581.2 | 963.4 | 1019.3 | 554.7 | 1114.2 |
| 345 | 252.6 | 620.5 | 437.9 | 408.2 | 509.3 | 204.8 | 544.8 | 404.8 | 294.1 |
| 347 | 2279.3 | 1845.7 | 6453.3 | 3490 | 1999.5 | 3041.5 | 2644 | 1859.9 | 2280.8 |
| 348 | 2856.1 | 2533.8 | 7636.1 | 6329.8 | 3556.3 | 5813.9 | 5133.1 | 4694.9 | 5037.6 |
| 349 | 353.3 | 256.7 | 290.3 | 316.7 | 301.8 | 407.4 | 319.1 | 485.8 | 258.4 |
| 350 | 386 | 804.7 | 473.6 | 475.2 | 611.1 | 257.1 | 657.4 | 638.3 | 199.2 |
| 351 | 308.4 | 2206.4 | 1213.1 | 2566.3 | 1996.9 | 246.9 | 1150.3 | 2079.9 | 292.1 |
| 352 | 355.6 | 83.4 | 314.2 | 140.3 | 111.5 | 364 | 265.6 | 231 | 294.5 |
| 353 | 232.6 | 402.1 | 295 | 294.2 | 423.7 | 229.4 | 384.5 | 414.6 | 243.7 |

3d

| SEQ ID NO: | 840TT | 842TT | 862TT | 863TT | 864TT | 865TT | 866TT | 867TT | 869TT |
|---|---|---|---|---|---|---|---|---|---|
| 354 | 413.4 | 103.1 | 28.5 | 89.1 | 50.8 | 119.4 | 632.2 | 9.2 | 48.7 |
| 355 | 518.1 | 63.6 | 16 | 83.3 | 29 | 114.5 | 55.8 | 49.5 | 44 |
| 356 | 617.8 | 1163.1 | 1507.8 | 789.4 | 1313.2 | 1067.3 | 1224.9 | 824.3 | 740.8 |
| 357 | 750.6 | 663.3 | 1662.6 | 876.7 | 839.2 | 1660 | 1243 | 1043.5 | 843.5 |
| 358 | 647.8 | 509.5 | 567.7 | 1088.7 | 1049.5 | 795 | 1349.4 | 535 | 1699.5 |
| 359 | 330.5 | 214.7 | 472.1 | 313.5 | 373.5 | 481.3 | 371.9 | 361.8 | 235.3 |
| 362 | 288.4 | 245.9 | 172.7 | 589.6 | 377.5 | 866.5 | 666.6 | 454.5 | 954 |
| 360 | 434.1 | 305.6 | 182.5 | 297.3 | 370.2 | 347.1 | 290.1 | 218.1 | 444.6 |
| 361 | 682.3 | 740.4 | 589.9 | 765.7 | 495.7 | 894.5 | 527.5 | 1472.7 | 327.2 |
| 363 | 435.5 | 328.8 | 483.4 | 387 | 360.5 | 673 | 502.1 | 431.2 | 367 |
| 1 | 532.1 | 658.9 | 827.5 | 640.1 | 768.3 | 484.6 | 619.1 | 510.9 | 964.5 |
| 2 | 4059.8 | 3830.7 | 4516.5 | 3770.5 | 2512.9 | 3756.6 | 2448.4 | 3524.2 | 3003.6 |
| 7 | 483.8 | 209.7 | 470.6 | 825.4 | 484.2 | 153.7 | 393.7 | 965 | 873.7 |
| 8 | 1199.1 | 1312 | 934.6 | 1643.2 | 1176.8 | 871.7 | 1342.3 | 768.5 | 732 |
| 9 | 8223.9 | 2596.3 | 7524.8 | 6220.9 | 3456.3 | 6027 | 7023.5 | 7427.5 | 3975.6 |
| 10 | 51.2 | 96.2 | 67.9 | 101.6 | 111.8 | 139.3 | 75.7 | 46.4 | 157.4 |
| 11 | 171.2 | 198.5 | 495.5 | 218.3 | 206 | 597.6 | 634.9 | 288.5 | 318.8 |
| 13 | 537.4 | 265 | 36.3 | 777.1 | 442.1 | 95.7 | 614.9 | 65.2 | 238.9 |
| 14 | 1233.6 | 1157.9 | 134.4 | 2731 | 1781.1 | 837.6 | 2365 | 195.6 | 747.9 |
| 15 | 699.2 | 133.5 | 191.7 | 417.5 | 408.8 | 260 | 185.5 | 349.2 | 539.4 |
| 16 | 662.4 | 1257.3 | 1518.2 | 1301 | 966.8 | 1066.2 | 1385 | 714.3 | 1347.5 |
| 17 | 1194.5 | 1224.2 | 2909.6 | 1355.9 | 1395.5 | 1413.2 | 1584.1 | 1543.7 | 1301.1 |
| 19 | 1305.5 | 169.4 | 164.2 | 167.4 | 153.8 | 335.4 | 192.4 | 217.8 | 159 |
| 20 | 11.1 | 1.1 | 55 | 1.1 | 1.2 | 69.6 | 36.1 | 1.7 | 2.7 |
| 21 | 240.8 | 87.2 | 45.6 | 290.6 | 14.9 | 100.6 | 193.6 | 1.2 | 665.2 |
| 22 | 9947.1 | 7799.8 | 11063.4 | 5454.8 | 5808.5 | 5943.2 | 5158.2 | 8719.7 | 4509.2 |
| 23 | 956.7 | 1.1 | 48.1 | 157.6 | 1.1 | 4.3 | 28.8 | 77.3 | 62.7 |
| 24 | 218 | 30.6 | 818.7 | 223.9 | 55.2 | 225 | 83.6 | 138.2 | 313.6 |
| 26 | 9557.1 | 76.6 | 228.7 | 772.1 | 58.3 | 169.6 | 349.8 | 241.6 | 342.1 |
| 27 | 776.7 | 416.1 | 446.1 | 321.7 | 837 | 194.8 | 624.3 | 214.8 | 248.9 |
| 29 | 59.3 | 307.6 | 113.8 | 111.9 | 151.8 | 93.7 | 155.2 | 94.7 | 165.9 |
| 30 | 1162 | 61.1 | 36.1 | 74 | 37.7 | 338 | 95.9 | 132.1 | 81.4 |
| 31 | 656.3 | 70.7 | 13.1 | 264 | 24.8 | 107.5 | 243.8 | 63.6 | 1804.1 |
| 33 | 863 | 622.5 | 646.3 | 338.4 | 225.9 | 1364.6 | 528.1 | 298.3 | 824.1 |
| 34 | 4801 | 4062.8 | 7041.9 | 2172.2 | 2709.9 | 7154.6 | 4874 | 3483.4 | 1898.9 |
| 35 | 349.5 | 48.6 | 21 | 69.1 | 220.8 | 140.3 | 127.8 | 42.4 | 29.6 |
| 36 | 247.6 | 112.1 | 70.6 | 952.1 | 127.4 | 437.9 | 132.7 | 244.9 | 2851.6 |
| 37 | 359.5 | 154.3 | 129.5 | 201 | 163.4 | 356.6 | 166.6 | 166.1 | 147.5 |
| 38 | 818.9 | 343.8 | 681 | 579.2 | 1066.9 | 635.4 | 454.1 | 452.9 | 944.3 |
| 40 | 584.7 | 371.3 | 337.3 | 437.1 | 313.3 | 551.1 | 403.2 | 378 | 412.8 |
| 41 | 247.9 | 211.8 | 28 | 324.9 | 206.9 | 141.2 | 142.1 | 246.9 | 1045.2 |
| 42 | 201.2 | 77.8 | 271.3 | 370.1 | 220.5 | 370.8 | 243.3 | 311.3 | 477.7 |
| 43 | 319.5 | 237 | 319.5 | 348.9 | 367.9 | 367.4 | 376.6 | 359.5 | 514.5 |
| 44 | 340.2 | 338.9 | 375.8 | 466.7 | 295.2 | 1064.8 | 611.2 | 385.6 | 862.4 |
| 45 | 387.6 | 484.6 | 587.1 | 607.2 | 566.7 | 339.3 | 634 | 461.7 | 686.8 |
| 46 | 312.8 | 273 | 211.3 | 310.6 | 243.5 | 430.8 | 275.4 | 232.3 | 243.1 |
| 47 | 267.1 | 166.9 | 95.5 | 209.9 | 200.1 | 356 | 306.7 | 200 | 468.1 |
| 48 | 586.4 | 32.7 | 36.8 | 85.4 | 15.6 | 170.4 | 44.6 | 128.7 | 52.4 |
| 49 | 559.1 | 182.8 | 87.8 | 323.1 | 320.3 | 292.7 | 479.7 | 171.1 | 244 |
| 50 | 183 | 51.5 | 313.7 | 151.2 | 54.7 | 307.2 | 159.4 | 147.7 | 107.5 |
| 51 | 50.2 | 57.3 | 25.1 | 53.5 | 27.6 | 365.3 | 326.7 | 129.5 | 249.3 |
| 52 | 195.7 | 196.6 | 173.8 | 234.1 | 186.2 | 225.4 | 159.6 | 208.9 | 221.8 |
| 53 | 82.5 | 34.1 | 142.8 | 294.3 | 73 | 168.9 | 158.4 | 50.3 | 1001.9 |
| 54 | 497.5 | 1164.8 | 197.8 | 1471.8 | 1002.7 | 709.6 | 1166.2 | 163.1 | 1728.2 |
| 55 | 119.7 | 111.7 | 100 | 104.8 | 90.9 | 118.7 | 116 | 94.5 | 92.2 |
| 56 | 50.4 | 78.9 | 15.7 | 207.8 | 125.4 | 69.1 | 86.5 | 91.8 | 155 |
| 57 | 913.7 | 120.1 | 39.3 | 348.7 | 96 | 112.4 | 648.3 | 63.7 | 1449.6 |
| 58 | 937.3 | 144.4 | 33.7 | 395.5 | 111.4 | 501.8 | 1139.1 | 62.2 | 1741.7 |
| 59 | 1524.7 | 2456.9 | 2314.6 | 1572.7 | 1908.7 | 1437.1 | 1816.2 | 851.3 | 1581 |
| 60 | 239.9 | 177.8 | 101.9 | 208.9 | 122.9 | 164.2 | 115.8 | 114.4 | 341.6 |
| 61 | 138.8 | 102.4 | 167.6 | 195.1 | 161.4 | 602.8 | 171.7 | 220.1 | 121.5 |
| 62 | 3218.4 | 1230.8 | 93.3 | 144.4 | 1893.7 | 776.3 | 1111.1 | 1116.3 | 275.7 |
| 63 | 476.2 | 251.9 | 390.8 | 305.5 | 390.5 | 446.7 | 360.3 | 186.2 | 416 |
| 64 | 260 | 108.5 | 72.5 | 133 | 186.3 | 125.9 | 184.1 | 121.4 | 174.1 |
| 65 | 130.1 | 114.1 | 115.9 | 113.8 | 100.7 | 57.6 | 84 | 103.6 | 167.3 |
| 66 | 736.8 | 1620 | 528.8 | 1200.9 | 1060.8 | 922.4 | 1062.5 | 613.3 | 1936.4 |
| 67 | 36967.4 | 32327.9 | 35416.1 | 33262.7 | 33086.4 | 50663.1 | 33055.8 | 33098.2 | 33842.1 |
| 68 | 3604.6 | 765.6 | 2711 | 2612.8 | 1433.6 | 3309.4 | 1090.5 | 3575.3 | 2217.7 |
| 69 | 4370.2 | 2244.8 | 8123.8 | 4669.2 | 2913.3 | 9134.7 | 2674.3 | 9458.6 | 4732.4 |
| 70 | 2223.5 | 1376.4 | 751.7 | 2378 | 1890.8 | 2166.2 | 2162.9 | 1456.9 | 3220.2 |
| 71 | 1018.7 | 90.7 | 156 | 1072.2 | 120.5 | 96.6 | 145.6 | 125.6 | 898.5 |
| 72 | 552.9 | 1523.3 | 537.5 | 355.6 | 575.3 | 229.2 | 397.7 | 248.8 | 869.3 |
| 73 | 447.7 | 234.9 | 263.5 | 297.8 | 293.7 | 265.4 | 305 | 231.6 | 465.4 |
| 75 | 260.1 | 159 | 459.2 | 194.5 | 212.8 | 460 | 245.4 | 508.2 | 472.1 |
| 76 | 273.6 | 135.4 | 1.1 | 2171.1 | 611.1 | 559.9 | 220.4 | 108.3 | 1748.8 |
| 77 | 4806.2 | 4952.7 | 7485.3 | 2585.4 | 4993.9 | 9359.9 | 6144.5 | 5753.5 | 2422 |
| 78 | 623.9 | 418.4 | 269 | 898.4 | 765.7 | 441 | 601.4 | 703 | 1341.8 |
| 79 | 121.6 | 161.5 | 129.6 | 160.7 | 133.3 | 143.3 | 133.6 | 130.7 | 177.4 |
| 80 | 132.5 | 767.8 | 1091.7 | 413.8 | 130.3 | 423 | 489.5 | 238.5 | 763.7 |
| 81 | 512.5 | 282.4 | 123.8 | 218.8 | 242.4 | 297 | 1287.3 | 81.3 | 806.9 |
| 82 | 309.9 | 198.2 | 168.6 | 248.4 | 267 | 111.1 | 195.8 | 299.2 | 260.3 |
| 84 | 387.2 | 136.7 | 73.1 | 108.8 | 68.4 | 133.5 | 96.7 | 102.1 | 324.1 |
| 85 | 248.9 | 142.3 | 90.9 | 119.5 | 146.4 | 305.5 | 231.4 | 148.7 | 109.4 |
| 86 | 128.2 | 81.2 | 328 | 73.6 | 54.4 | 101.3 | 98.7 | 95.6 | 101 |
| 87 | 389.7 | 249.9 | 208.9 | 161 | 233.2 | 395.2 | 213.6 | 276.9 | 167.9 |
| 88 | 3944.8 | 2735.3 | 8374.9 | 5614.3 | 5926.1 | 7145.8 | 6096.2 | 9499.1 | 4340.8 |
| 89 | 354 | 171.2 | 148.1 | 205.8 | 141.7 | 276.5 | 145.7 | 180.3 | 128.5 |
| 90 | 115.9 | 91.9 | 105.1 | 103.9 | 93 | 163.4 | 108.3 | 110.6 | 69.3 |
| 91 | 1164.3 | 208.6 | 1.2 | 284.2 | 96.6 | 444.2 | 1453.8 | 67 | 464.2 |
| 92 | 4085 | 6778.2 | 2708.1 | 9676.9 | 5168.6 | 3758.8 | 6575.2 | 2375.7 | 10249.7 |
| 93 | 301.2 | 226.8 | 421.5 | 194.9 | 232.2 | 375.5 | 171.1 | 428.1 | 163.7 |
| 94 | 995.1 | 541.1 | 897.8 | 657.7 | 595.7 | 381.9 | 809 | 335 | 1275.8 |
| 95 | 1045.2 | 582.5 | 118.6 | 543.6 | 452.1 | 179.3 | 209.1 | 188.8 | 345.6 |
| 96 | 151.5 | 196 | 167.6 | 244 | 181.7 | 245.6 | 205.7 | 171.9 | 230.8 |
| 97 | 166.6 | 276.5 | 308 | 289.5 | 386.8 | 228.9 | 347 | 249.1 | 374.6 |
| 98 | 60.4 | 31.5 | 27 | 23.1 | 9.2 | 31.1 | 20 | 38.2 | 21.7 |
| 99 | 253.6 | 187.7 | 194.3 | 246 | 183.1 | 311.2 | 227.1 | 164.5 | 250.1 |
| 100 | 19287.6 | 6400.4 | 8181.3 | 2605.3 | 10229.3 | 7403 | 9672.3 | 11255.4 | 738.2 |
| 101 | 266.7 | 227.3 | 183.5 | 187 | 210.8 | 246.9 | 215.4 | 175.2 | 303.8 |
| 102 | 171.5 | 108.4 | 168.3 | 145.6 | 139.2 | 216.4 | 161.6 | 192.6 | 129.1 |
| 103 | 278.8 | 262.5 | 300.2 | 251.6 | 305.7 | 614.4 | 341.7 | 296.7 | 354.3 |
| 104 | 443.1 | 801.2 | 207.5 | 609.2 | 639.4 | 662.8 | 235.7 | 480.5 | 507.8 |
| 105 | 463.1 | 1053.8 | 415.1 | 584.5 | 740.7 | 772.3 | 384.2 | 617 | 387.3 |
| 106 | 518.9 | 705.8 | 207.9 | 540.7 | 585.7 | 524.4 | 227 | 513.5 | 481.3 |
| 107 | 364.9 | 105 | 41.3 | 163.2 | 64.4 | 139.2 | 185.1 | 113.3 | 132.5 |
| 108 | 330.2 | 330.9 | 645.2 | 275.1 | 408 | 425.5 | 324.6 | 567.1 | 309.2 |
| 109 | 67.3 | 6034.5 | 117 | 7025.2 | 3555.9 | 130.1 | 4629.2 | 56.5 | 4997.5 |
| 110 | 28.9 | 11743.3 | 96.5 | 11643.7 | 6913.6 | 1.2 | 6469 | 1.1 | 12381.4 |
| 111 | 1421.1 | 1571 | 367.8 | 1848.8 | 3058.4 | 428.3 | 1123.4 | 1923.1 | 1485.6 |
| 112 | 527 | 115.6 | 213 | 921.9 | 582.1 | 50.6 | 951.8 | 441.7 | 1495.5 |
| 113 | 455.9 | 246.9 | 53.3 | 182.6 | 309 | 119 | 257 | 158.9 | 473.4 |
| 114 | 507.9 | 943.6 | 1193 | 488.7 | 600.7 | 470.7 | 525.8 | 646.5 | 1445.6 |
| 115 | 579.2 | 287 | 238.3 | 468.6 | 331.5 | 339.6 | 406.9 | 347.8 | 648.7 |
| 116 | 323 | 237.9 | 245 | 203.6 | 210.8 | 323.5 | 238.4 | 227.4 | 251.7 |
| 117 | 2477.5 | 2049 | 5384.6 | 1932.8 | 2356.6 | 2151 | 1724 | 4147.6 | 916.2 |
| 118 | 442.9 | 1260.5 | 217.3 | 146.6 | 481 | 247.5 | 132.8 | 138.7 | 375.2 |
| 119 | 196.2 | 294.2 | 59.3 | 102.7 | 207.4 | 22.6 | 112.9 | 103.5 | 412.3 |
| 120 | 173.7 | 63.5 | 76.2 | 116 | 85.4 | 51.5 | 83.3 | 88.4 | 65.8 |
| 121 | 572.4 | 1198.8 | 854.2 | 827.2 | 1024.8 | 671 | 1242.7 | 359.7 | 1485.9 |
| 122 | 290.1 | 202.3 | 237.7 | 134.1 | 153.2 | 200.7 | 314.3 | 99.7 | 125.7 |
| 123 | 49.5 | 102.7 | 113.5 | 109.8 | 125.4 | 167.4 | 124.8 | 161 | 127.5 |
| 124 | 122 | 156.7 | 104.5 | 141 | 126.9 | 183.5 | 129.5 | 127.1 | 87.6 |
| 125 | 901.7 | 798.3 | 548.8 | 603.5 | 613.7 | 1170.8 | 823 | 708 | 576.3 |
| 126 | 1558.5 | 2022.3 | 1906.6 | 1073.1 | 1537.3 | 1698.3 | 1203.7 | 1574 | 734.6 |
| 127 | 67.5 | 94.2 | 121.1 | 129.3 | 177.1 | 229.6 | 142.1 | 113.2 | 149.3 |
| 128 | 270.3 | 227.2 | 174 | 236.1 | 175.5 | 523.6 | 265.8 | 219.6 | 215.4 |
| 129 | 252.6 | 119.8 | 55.2 | 205.4 | 120.9 | 238.2 | 283.6 | 118.6 | 158.2 |
| 130 | 71 | 74.9 | 81.3 | 173.4 | 64.2 | 151.7 | 101.2 | 72.2 | 206.8 |
| 131 | 99.7 | 56.1 | 56.9 | 101.9 | 71.1 | 71.4 | 85.6 | 39.6 | 410 |
| 132 | 179.1 | 167.2 | 163.5 | 226.3 | 168.3 | 291.1 | 198.8 | 168.5 | 289.6 |
| 133 | 65.3 | 135.6 | 129.8 | 134.1 | 108.6 | 90.5 | 155.9 | 90.6 | 247.7 |
| 134 | 141.8 | 67.6 | 374.3 | 220.5 | 242.9 | 331.8 | 297.9 | 192.8 | 232 |
| 135 | 323.6 | 502.2 | 986.3 | 429.9 | 398.9 | 720.6 | 576.6 | 551 | 856.1 |
| 138 | 179.5 | 85.7 | 141.7 | 111.3 | 90.4 | 263.4 | 150 | 100.7 | 95.9 |
| 139 | 106.9 | 129.9 | 131.6 | 116.9 | 120.4 | 167.8 | 111.3 | 119.2 | 214.6 |
| 140 | 1721.8 | 3036.3 | 2185.5 | 2508.8 | 4344.2 | 551 | 489.1 | 3284.4 | 2492 |
| 141 | 2410.6 | 3225.5 | 1665.6 | 1916.7 | 2935.3 | 1825.5 | 2844.6 | 1474.7 | 1924.7 |
| 144 | 467.5 | 2221 | 378.9 | 13755 | 448 | 595.3 | 8268.8 | 333.6 | 24504.7 |
| 145 | 184.9 | 199.7 | 201.3 | 201.7 | 182.6 | 355.7 | 205.2 | 181.5 | 193.7 |
| 146 | 199.9 | 232.9 | 156.3 | 218.2 | 193.1 | 318.3 | 215.5 | 183.7 | 234.1 |
| 147 | 39 | 23.2 | 35 | 23.8 | 39.4 | 81 | 29.4 | 8.2 | 43.7 |
| 148 | 623.9 | 168.1 | 255.4 | 231.2 | 256.6 | 443 | 311.3 | 211.5 | 208.8 |
| 149 | 298.4 | 748.7 | 946.9 | 488 | 781.4 | 682.8 | 843.3 | 449.2 | 418 |
| 150 | 271.8 | 256.3 | 118.7 | 145.6 | 239.5 | 283.8 | 224.4 | 131.5 | 178.9 |
| 151 | 386 | 739.9 | 194.8 | 394.3 | 448.1 | 199.1 | 376.1 | 165.6 | 142 |
| 153 | 101.1 | 82.9 | 117.5 | 170.7 | 94.7 | 158.3 | 93.7 | 98.7 | 124.8 |
| 154 | 696.5 | 806.1 | 188.7 | 316.4 | 89.7 | 503.2 | 343.3 | 153.6 | 615.8 |
| 155 | 126.3 | 91.9 | 134.1 | 121.4 | 87.9 | 243.6 | 235.9 | 104.5 | 96.7 |
| 156 | 119.2 | 40.6 | 68.7 | 94.7 | 77.3 | 67 | 131.6 | 62.7 | 173.3 |
| 157 | 77.5 | 165.7 | 132.1 | 100.7 | 88 | 103.8 | 133.9 | 113.1 | 166.4 |
| 158 | 30.3 | 9.6 | 1.4 | 158.3 | 97.2 | 41.9 | 159.9 | 1.2 | 1019.8 |
| 159 | 3785.9 | 3917 | 4901.3 | 3467.1 | 3669.5 | 3653.4 | 3209.2 | 3643.5 | 3005.3 |
| 161 | 90.5 | 73.4 | 50 | 2779.2 | 176 | 170.6 | 3362.6 | 1.2 | 4114.9 |
| 162 | 165.6 | 48.8 | 50.3 | 49 | 23.6 | 75.1 | 52.8 | 83.8 | 63.7 |
| 164 | 274.7 | 1048.7 | 159.5 | 2491.4 | 3031 | 446.5 | 2413.5 | 213.4 | 2997.7 |
| 166 | 5679.8 | 5894 | 6666.6 | 4629.2 | 8306.1 | 5972 | 3859.7 | 5542.7 | 4096.6 |
| 167 | 2803.8 | 865.7 | 583.6 | 1447.2 | 1517.1 | 468.1 | 1020.9 | 895.3 | 1756 |
| 168 | 664.5 | 1070.8 | 946.4 | 1307.6 | 1154.7 | 804.8 | 787.3 | 1131.5 | 1135.4 |
| 169 | 4025.8 | 9912.9 | 783 | 3510.5 | 4082.6 | 1690.6 | 3122.8 | 3606.3 | 3273.9 |
| 170 | 630.2 | 1665.5 | 1244.3 | 2308 | 1487.7 | 895.5 | 1906.2 | 884.1 | 2192.6 |
| 171 | 1597.9 | 18.2 | 1.3 | 52.3 | 123.4 | 3 | 174 | 103.7 | 50.6 |
| 172 | 648.7 | 336.4 | 566.3 | 568.5 | 546.7 | 747 | 570.3 | 569.6 | 634.3 |
| 173 | 301.5 | 351.8 | 502.4 | 419.8 | 242.7 | 82.9 | 106.8 | 377.3 | 1153.3 |
| 176 | 205 | 103.6 | 37.4 | 2372.3 | 1244.7 | 431 | 2046.7 | 1.1 | 6658.9 |
| 177 | 657.2 | 340.2 | 225.5 | 561.7 | 411 | 195 | 319.8 | 255.7 | 474.3 |
| 178 | 133.2 | 340.8 | 44 | 588.7 | 77.1 | 236.2 | 156 | 90.1 | 2026.1 |
| 179 | 114.7 | 48.7 | 65.5 | 86.7 | 56.7 | 89.4 | 59.6 | 95.5 | 53.8 |
| 180 | 85.1 | 88.5 | 71.9 | 296.6 | 369.5 | 193.3 | 269.4 | 71.5 | 700 |
| 181 | 13466.7 | 11481.6 | 14492 | 10957.2 | 9935.2 | 21897 | 10184 | 12851.6 | 7312.1 |
| 182 | 654.9 | 653.9 | 427.9 | 406.4 | 491.3 | 347.1 | 403.3 | 562.8 | 449.5 |
| 183 | 1741.8 | 1.2 | 72 | 216.6 | 1.5 | 13.4 | 127.3 | 74.7 | 60.8 |
| 184 | 210.8 | 167 | 156.2 | 4707.4 | 163.4 | 275.2 | 340.4 | 183.2 | 408.7 |
| 185 | 2742.8 | 559.8 | 331.2 | 1091.6 | 875.4 | 2220.6 | 1051 | 563.7 | 1819.8 |
| 186 | 540.1 | 408.4 | 119.6 | 379 | 511.7 | 293.6 | 378.6 | 390.8 | 334.8 |
| 187 | 461 | 78.3 | 76.6 | 73.6 | 56.4 | 324 | 75.8 | 168 | 671.7 |
| 188 | 583.1 | 57.1 | 288.4 | 239 | 128.3 | 224 | 113.7 | 356.9 | 137.6 |
| 189 | 194.8 | 29.2 | 85.5 | 119.5 | 62.4 | 143.8 | 67.8 | 131.3 | 68 |
| 190 | 123.9 | 206.8 | 248.5 | 85.4 | 260.6 | 70.6 | 194.8 | 276 | 275.5 |
| 191 | 1270.2 | 2209.5 | 1240.3 | 741.8 | 1132.9 | 3308.2 | 2393.3 | 694.6 | 828.7 |
| 192 | 119.5 | 81 | 147 | 79.8 | 63.3 | 171.5 | 100.5 | 89 | 245.3 |
| 193 | 572 | 747.2 | 2493.9 | 1776.2 | 1406.7 | 2749.4 | 771.4 | 2411.6 | 1560.3 |
| 194 | 156.3 | 196.3 | 74.6 | 184.9 | 231.7 | 72.8 | 155.2 | 181 | 247.3 |
| 195 | 308.3 | 259.1 | 115.5 | 265.8 | 182.4 | 266.7 | 269.9 | 321.4 | 172.6 |
| 196 | 8888.9 | 1967.3 | 1862.4 | 4252.6 | 4150.7 | 1524.3 | 2417.5 | 2838 | 4062.6 |
| 197 | 123.1 | 56.4 | 64.3 | 55.9 | 63.4 | 61 | 92.7 | 88.5 | 67.4 |
| 198 | 72.7 | 46.7 | 59.1 | 128.1 | 86.2 | 134.7 | 76 | 89.2 | 1231.8 |
| 199 | 715.5 | 149.9 | 77.4 | 200.9 | 99.1 | 117.1 | 93.7 | 83.2 | 58.1 |
| 200 | 436.8 | 119 | 110 | 279 | 144.7 | 161.1 | 188.8 | 132.1 | 183.8 |
| 201 | 420.4 | 136.7 | 34.5 | 76 | 82.5 | 105.4 | 714.7 | 46.9 | 48.3 |
| 203 | 216.9 | 328.6 | 478.5 | 1783 | 339.6 | 318.5 | 429.8 | 215.3 | 696.8 |
| 204 | 424.2 | 534.9 | 2224.1 | 826.2 | 1409.9 | 1071.2 | 1167.6 | 730.8 | 1179.7 |
| 205 | 5342.3 | 6991.4 | 6610.9 | 7662.4 | 6557.2 | 4601.1 | 6434.7 | 5994.9 | 5922.6 |
| 206 | 196.9 | 136.2 | 256 | 226 | 167.3 | 461.3 | 381.3 | 255.3 | 194 |
| 207 | 856.9 | 2195.1 | 498.1 | 3374 | 2428.9 | 655.5 | 1311 | 1015.2 | 1559.2 |
| 208 | 394.5 | 627.5 | 228.8 | 462.5 | 481.5 | 375.3 | 249.2 | 214.1 | 366.3 |
| 209 | 4454.3 | 1325.4 | 400 | 2326.1 | 2927.3 | 297.9 | 2136.1 | 2044.2 | 4109.1 |
| 211 | 9691.9 | 10693.8 | 23350.1 | 14624.2 | 22270.2 | 30888 | 17057.7 | 24224.7 | 20568.5 |
| 212 | 572.3 | 271.2 | 156.5 | 584.8 | 425.7 | 440.5 | 458.5 | 393.6 | 829.4 |
| 213 | 67 | 114 | 61.5 | 73.5 | 71.3 | 151.9 | 87.1 | 81 | 82.8 |
| 215 | 822.1 | 2240.3 | 284 | 3771.2 | 3251.7 | 364.9 | 1154.1 | 891.6 | 1823.7 |
| 216 | 1084.8 | 1208.4 | 774.3 | 825.1 | 931.3 | 1019 | 1459.9 | 886.9 | 394.2 |
| 217 | 263.5 | 128.1 | 178 | 388.9 | 253.4 | 229.3 | 192.2 | 287.8 | 619.7 |
| 218 | 247 | 369 | 430.6 | 309.9 | 285.4 | 378.5 | 371.4 | 431.1 | 300.2 |
| 220 | 192.1 | 65.1 | 72.8 | 82.9 | 64.6 | 195.1 | 82 | 97.9 | 152.1 |
| 221 | 874.9 | 273.4 | 348.7 | 610.2 | 398.6 | 589.1 | 442 | 576.1 | 781.3 |
| 223 | 203.5 | 216.6 | 257.1 | 227.9 | 193 | 239.1 | 307.3 | 269.5 | 181.6 |
| 227 | 1491.4 | 508.8 | 973.3 | 663 | 611.5 | 1289.2 | 657.2 | 715.4 | 1113.4 |
| 228 | 479.7 | 346.7 | 305.5 | 399.5 | 432.4 | 168.3 | 334.5 | 406.8 | 398 |
| 229 | 344.9 | 179.3 | 263.5 | 202.7 | 135.8 | 258.4 | 146.7 | 307 | 178.3 |
| 230 | 408 | 173.8 | 53.4 | 230 | 72.6 | 146.6 | 89.4 | 72.6 | 1044.4 |
| 231 | 60.9 | 169.5 | 179.7 | 565.7 | 166.8 | 279.1 | 189.2 | 170.4 | 295.4 |
| 232 | 7655.5 | 69.6 | 144.4 | 522.1 | 6.3 | 156.1 | 223.7 | 143.5 | 237.3 |
| 233 | 10823.9 | 8532.5 | 7380 | 6335.2 | 4653 | 14890.4 | 6151.6 | 6357.9 | 8900.2 |
| 235 | 964.3 | 116.8 | 99.5 | 118.8 | 232 | 172.3 | 135.3 | 109.6 | 68.6 |
| 236 | 284.7 | 110.1 | 85.2 | 190 | 113.2 | 251.9 | 125 | 160.6 | 109 |
| 237 | 2149.2 | 2342.6 | 1981.7 | 1910 | 1532.6 | 1925.6 | 1630.1 | 2187 | 2001.9 |
| 238 | 1376.8 | 1774.9 | 1294.3 | 1639.9 | 1873.9 | 1331 | 1069.9 | 1075.9 | 920.9 |
| 239 | 677.1 | 102.3 | 55.7 | 598 | 88.8 | 415.3 | 790.4 | 144.5 | 446.3 |
| 240 | 910 | 202.5 | 215.3 | 1413.1 | 146.1 | 590.9 | 1856.1 | 149.8 | 658.9 |
| 241 | 1746.2 | 288.3 | 229.3 | 1845.3 | 213.4 | 1394.4 | 2581 | 292.1 | 1300.3 |
| 242 | 3459.7 | 3959.5 | 1573.1 | 930.4 | 1419.2 | 4708.4 | 2169.8 | 1081.9 | 3241.5 |
| 243 | 789.8 | 205.4 | 201.9 | 189.4 | 191.5 | 359.6 | 385.6 | 187.1 | 231.5 |
| 244 | 166.8 | 289.4 | 346.4 | 297.2 | 266.9 | 336.1 | 253.7 | 298.8 | 291.7 |
| 246 | 735.5 | 339.5 | 415.4 | 754.5 | 305.6 | 434.1 | 389.1 | 182.4 | 1612.5 |
| 247 | 152.5 | 91.8 | 114.1 | 105.7 | 117.4 | 162.4 | 111.1 | 109 | 77.5 |
| 248 | 113.4 | 311.4 | 156.1 | 827.2 | 163.8 | 295.1 | 550.6 | 57.7 | 969 |
| 249 | 546.3 | 2609.6 | 77.3 | 1171.4 | 2406.9 | 1453.1 | 2505.9 | 1690.1 | 2558.1 |
| 251 | 114.6 | 75.4 | 190.3 | 144.5 | 67.4 | 139.8 | 164.5 | 86.3 | 272.4 |
| 253 | 343.5 | 454 | 621.6 | 336.8 | 375.4 | 294.5 | 353 | 308 | 370.8 |
| 254 | 634.2 | 878.2 | 135.8 | 1836.5 | 1289.6 | 195.3 | 904.4 | 151.2 | 1561.8 |
| 255 | 104.9 | 294.1 | 41.8 | 691.5 | 87 | 372.2 | 205.6 | 116.5 | 1995.4 |
| 256 | 859.7 | 310.3 | 98.5 | 401.3 | 162.4 | 559.4 | 1488.4 | 155 | 514.5 |
| 257 | 100.3 | 86.9 | 144.3 | 100.1 | 101.5 | 226.9 | 206.1 | 125.7 | 172.8 |
| 258 | 150.3 | 110.9 | 556.9 | 31 | 96.4 | 364.7 | 435.1 | 1.3 | 56.5 |
| 259 | 1252.6 | 22.5 | 14.5 | 71.4 | 242.1 | 53.8 | 318.2 | 52.7 | 72.5 |
| 260 | 153.5 | 162.6 | 101.6 | 142.8 | 117.7 | 170.7 | 162.1 | 100.8 | 140.1 |
| 261 | 284.9 | 426 | 473.6 | 367.3 | 285.2 | 584.1 | 539.9 | 954.5 | 991.9 |
| 263 | 387.1 | 519.8 | 1024.7 | 612.1 | 575.4 | 914.8 | 292.9 | 533.1 | 500.2 |
| 263 | 443.5 | 164.6 | 135.3 | 170.4 | 102.9 | 275.3 | 155 | 114.2 | 855 |
| 265 | 418.7 | 323.5 | 784.9 | 1333.6 | 878.4 | 655 | 510.2 | 758 | 222 |
| 266 | 365.9 | 238.9 | 328.9 | 335.6 | 303.6 | 404.8 | 506.9 | 500.5 | 362.2 |
| 256 | 232 | 48.3 | 68.8 | 144.5 | 86.5 | 161 | 74.1 | 81 | 263.7 |
| 268 | 789.4 | 359.6 | 223.2 | 619.4 | 600 | 188.7 | 380.9 | 385.6 | 616.2 |
| 269 | 29.5 | 23.7 | 45.2 | 37.7 | 42.9 | 141.6 | 73.5 | 56.7 | 27.4 |
| 270 | 318.9 | 330.1 | 251.6 | 249.2 | 249.1 | 310.4 | 140.9 | 168.8 | 208.5 |
| 271 | 239.6 | 226.6 | 272.6 | 240.3 | 278.2 | 416.5 | 239.5 | 262.2 | 282.4 |
| 272 | 529.2 | 443 | 502.9 | 351.9 | 421.7 | 790.6 | 423.8 | 540.7 | 390.3 |
| 273 | 2412.2 | 538 | 5359.4 | 2677 | 2738.3 | 2513.7 | 2568.7 | 3343.1 | 6538 |
| 274 | 860.6 | 187.6 | 415.1 | 523.9 | 197.7 | 408.9 | 297.8 | 848.1 | 225.6 |
| 275 | 810.8 | 120.9 | 107.2 | 223.4 | 149.2 | 360.4 | 213.5 | 132.2 | 481.2 |
| 276 | 3000.6 | 430.1 | 824.6 | 833 | 608.9 | 992.7 | 603.1 | 628.9 | 1368.2 |
| 277 | 143.4 | 150.6 | 195.4 | 175.5 | 161.1 | 288.2 | 217.2 | 177.8 | 321.7 |
| 278 | 1181.4 | 13.4 | 74.4 | 130.2 | 391.9 | 174.1 | 641.2 | 103.4 | 104.3 |
| 279 | 3167.2 | 3036.4 | 3286.5 | 3373.9 | 2195.2 | 1542 | 1783.5 | 1888.5 | 2287.8 |
| 280 | 2799.6 | 4372.9 | 8233.1 | 4783.5 | 3720.7 | 5792.3 | 3596.6 | 2627.6 | 3750.3 |
| 281 | 198.3 | 45.4 | 21.1 | 878.5 | 124.3 | 131.5 | 432.7 | 26.2 | 503.4 |
| 282 | 262.4 | 214.2 | 212.7 | 210.6 | 257.2 | 367.2 | 315.7 | 214.2 | 206 |
| 283 | 200.9 | 307.7 | 203.2 | 180 | 205.1 | 205.9 | 289.5 | 199.1 | 361.3 |
| 284 | 86.1 | 79 | 44.8 | 62.9 | 58.3 | 68.8 | 54.7 | 64.2 | 67.5 |
| 285 | 87.3 | 96.6 | 120.5 | 99.3 | 90.3 | 149.5 | 127.6 | 90 | 82.7 |
| 286 | 786.2 | 1509.2 | 1245.6 | 480.5 | 1419.1 | 1355.4 | 1398.3 | 986.2 | 463.7 |
| 287 | 130.9 | 88.7 | 115.7 | 133.4 | 101 | 206.6 | 124.4 | 129.4 | 95.2 |
| 288 | 121.5 | 110.5 | 133.2 | 130.9 | 129.7 | 239.3 | 147.4 | 130.8 | 98.9 |
| 289 | 817 | 97.8 | 1.2 | 264.2 | 130.1 | 209 | 209.4 | 93.1 | 162 |
| 291 | 128.3 | 84.3 | 184.7 | 105.8 | 127.5 | 140.4 | 106.4 | 110.2 | 175.4 |
| 292 | 325.5 | 712.8 | 127.1 | 172.1 | 269.8 | 126.4 | 1240.7 | 58 | 79 |
| 293 | 169.4 | 70.3 | 44.4 | 339.3 | 157.8 | 14.6 | 329.2 | 57 | 289.7 |
| 295 | 1114.8 | 74.6 | 91 | 388.6 | 176.3 | 215.7 | 303 | 129.7 | 708.9 |
| 296 | 1100.3 | 1475.6 | 747.1 | 869.3 | 1179.1 | 893.3 | 1093.5 | 664 | 1046.4 |
| 297 | 80.1 | 103.7 | 60.5 | 51.8 | 26.9 | 86 | 54.9 | 51.9 | 60.9 |
| 298 | 262.5 | 378 | 262.4 | 322.1 | 347.3 | 553.8 | 442.5 | 361.5 | 482.8 |
| 299 | 1244.6 | 880.6 | 660.4 | 1666.7 | 1114.4 | 999.2 | 1190.8 | 835.1 | 1409.5 |
| 300 | 221.5 | 287.8 | 78.8 | 1021.2 | 396.7 | 142.9 | 552.3 | 600.2 | 1201.1 |
| 301 | 345.6 | 176.4 | 916.7 | 791.8 | 996.1 | 2261.6 | 747.6 | 1879.6 | 867.3 |
| 302 | 30.1 | 11.5 | 9.6 | 1.2 | 9.5 | 52.1 | 8.2 | 31.1 | 20.4 |
| 303 | 659.7 | 792.4 | 1951.7 | 791.9 | 1024.8 | 1077.6 | 1052.7 | 1025.2 | 591.6 |
| 304 | 338.3 | 113.8 | 145.9 | 218.3 | 159.1 | 368.5 | 315.3 | 213.9 | 279.5 |
| 305 | 126.3 | 179.5 | 829.3 | 410.1 | 205.7 | 213 | 328.4 | 168.9 | 2353 |
| 306 | 137.6 | 129.3 | 119.7 | 111.1 | 136.2 | 360.3 | 171.7 | 145.8 | 121.9 |
| 307 | 116.1 | 98.9 | 137.8 | 143.6 | 128.3 | 221.3 | 155.3 | 111.8 | 121.6 |
| 308 | 1839.8 | 1691.4 | 3877.1 | 1787.2 | 1771.6 | 990 | 1269.4 | 1210.9 | 1188.7 |
| 310 | 746.5 | 649 | 365.2 | 639.4 | 842.4 | 331.6 | 428.2 | 770.7 | 283.9 |
| 311 | 148.4 | 156.4 | 215.3 | 228.8 | 178.6 | 94.4 | 194.5 | 255.6 | 341 |
| 312 | 960.4 | 1273.3 | 387.3 | 768.1 | 1668 | 504.5 | 546.2 | 772.8 | 843.7 |
| 313 | 116.8 | 110.3 | 118.2 | 691.9 | 301.6 | 156.3 | 349.8 | 120.8 | 1297 |
| 314 | 813.7 | 765 | 104 | 454.5 | 738.3 | 343 | 480.5 | 177.9 | 358 |
| 315 | 511.2 | 104.2 | 79.8 | 249.6 | 127.6 | 186.6 | 134.3 | 235.8 | 364 |
| 316 | 333.7 | 362.7 | 292.4 | 420 | 274.7 | 331.6 | 438.9 | 346.4 | 445.6 |
| 317 | 135.8 | 140 | 147.1 | 152.2 | 131.7 | 314.3 | 145.4 | 127.2 | 161.3 |
| 318 | 177.4 | 80.7 | 163.7 | 110.3 | 146.9 | 54.5 | 212.4 | 38.7 | 48.6 |
| 319 | 137.7 | 159.9 | 208.9 | 347.1 | 302.7 | 212.6 | 492.3 | 225 | 299.2 |
| 320 | 786.7 | 569.4 | 419.9 | 576.6 | 664 | 261.9 | 358.7 | 564.8 | 362.1 |
| 321 | 430.1 | 418.3 | 554.5 | 345.7 | 495.1 | 766.8 | 520.2 | 522.1 | 417.8 |
| 322 | 313.5 | 258.9 | 206 | 327.9 | 350.1 | 237.1 | 317.3 | 284.4 | 302.2 |
| 323 | 1640.1 | 3893.2 | 6623 | 4933.3 | 4083.6 | 4146.3 | 4123.6 | 2877.7 | 8765.3 |
| 324 | 191.6 | 52.6 | 89.7 | 451.6 | 184.5 | 161.8 | 224.9 | 94.8 | 485.6 |
| 325 | 252.3 | 394.8 | 205 | 336.6 | 342.2 | 306 | 382.9 | 200 | 472.4 |
| 326 | 6503.5 | 4515.1 | 5659.1 | 3116.9 | 4025.8 | 4887.6 | 5753.4 | 5207.4 | 3124.3 |
| 327 | 32.7 | 114.3 | 47.6 | 44.2 | 34.9 | 28.1 | 45.1 | 32.7 | 122 |
| 328 | 572.1 | 311.6 | 141.9 | 444 | 207.9 | 70.7 | 242.6 | 305.2 | 432.5 |
| 329 | 55.7 | 56.6 | 98.4 | 87.9 | 54.4 | 253.9 | 95 | 87.8 | 62.1 |
| 330 | 248.9 | 21.4 | 18.4 | 33.3 | 71.6 | 70.8 | 50.4 | 26.1 | 41.6 |
| 331 | 262.5 | 211 | 258.2 | 272.6 | 238.9 | 488.3 | 289.6 | 242.5 | 276.5 |
| 333 | 527 | 469.3 | 712.6 | 701.7 | 769.3 | 702.2 | 868.3 | 980.3 | 1069.6 |
| 334 | 178.8 | 178 | 143.4 | 202.5 | 157.4 | 217.1 | 144 | 129.4 | 147.4 |
| 335 | 109.7 | 80.4 | 65 | 59.9 | 71 | 237.8 | 69.3 | 69.9 | 140.5 |
| 336 | 478.1 | 1866 | 439.4 | 413 | 717.7 | 515.6 | 725.6 | 440.9 | 491.5 |
| 337 | 250.5 | 86.1 | 605.5 | 216 | 112.1 | 769 | 301 | 201.7 | 436.9 |
| 338 | 207.4 | 381.7 | 182.5 | 222.8 | 212.2 | 291.2 | 398.5 | 122.7 | 422.9 |
| 339 | 491.6 | 370.5 | 242.7 | 371.6 | 357.1 | 291.6 | 301 | 329.6 | 333.1 |
| 340 | 262.2 | 228.9 | 221.7 | 277.5 | 209.8 | 433.8 | 234.6 | 244 | 238.8 |
| 341 | 553.7 | 859.2 | 680.7 | 749.1 | 833.5 | 945.2 | 877.8 | 1040.5 | 836.3 |
| 343 | 82.4 | 129.6 | 166.7 | 112.2 | 227 | 121.6 | 417.5 | 99.3 | 261.1 |
| 344 | 1494.7 | 1234.1 | 923 | 1174 | 1290.7 | 695.2 | 1049.8 | 1243.6 | 776.1 |
| 345 | 229.2 | 243.3 | 208 | 263.4 | 197.6 | 424 | 253.1 | 228.2 | 190 |
| 347 | 2522.7 | 2002 | 1475.1 | 3154.4 | 2419.4 | 3643.7 | 3353.4 | 2213 | 2257.1 |
| 348 | 5357.3 | 8676.5 | 4846.9 | 7151 | 6595.2 | 9416.2 | 8225.1 | 8754.7 | 7625.2 |
| 349 | 199 | 234.6 | 342.6 | 366.5 | 251 | 342.4 | 222.3 | 330.6 | 366.8 |
| 350 | 425.9 | 228.7 | 186 | 194.8 | 307.5 | 295.9 | 344.4 | 186.6 | 478.3 |
| 351 | 639.7 | 438.8 | 120.8 | 247.4 | 113.3 | 139.6 | 323 | 154.5 | 311.5 |
| 352 | 383.1 | 438.1 | 904.1 | 394.6 | 424.3 | 618.5 | 412.3 | 428.9 | 250.7 |
| 353 | 440.7 | 413.1 | 270.3 | 281.2 | 203 | 315.4 | 237.6 | 265.9 | 206.9 |

3e

| SEQ ID NO: | 871TT | 879TT | 881TT | 882TT | 883TT | 884TT | 885TT | 886TT |
|---|---|---|---|---|---|---|---|---|
| 354 | 116.3 | 981.8 | 502.2 | 324.4 | 156.7 | 786.8 | 376.6 | 642.7 |
| 355 | 66.1 | 8420.7 | 2645.1 | 6152 | 13553.8 | 2564.7 | 3412.8 | 12344.6 |
| 356 | 338.5 | 1495.5 | 623.7 | 501.4 | 743.6 | 903.3 | 1811.4 | 741.6 |
| 357 | 443.4 | 1347.3 | 566 | 608.2 | 679.7 | 484.6 | 1559 | 983.6 |
| 358 | 700.6 | 1921.2 | 2381.5 | 2373.2 | 1674.3 | 2027.6 | 3756.9 | 1590.4 |
| 359 | 376 | 185.1 | 264.6 | 206.9 | 308.2 | 331.9 | 281.8 | 247.9 |
| 362 | 655.5 | 1294.9 | 729.9 | 1088.1 | 864.4 | 1725.1 | 1214.9 | 1246.6 |
| 360 | 266.2 | 611.8 | 464.8 | 543.6 | 452.1 | 537.3 | 693.4 | 474.9 |
| 361 | 152.3 | 149.9 | 338.7 | 186.5 | 167.3 | 256.5 | 235.5 | 312.1 |
| 363 | 570.7 | 493.8 | 575.1 | 513.3 | 517.2 | 615.3 | 759.7 | 454.4 |
| 1 | 130.2 | 622.4 | 1944.7 | 1584.5 | 1981.6 | 1283.3 | 420.9 | 1894.3 |
| 2 | 411.7 | 1993.4 | 3797.1 | 2512.7 | 4511.4 | 2897.7 | 1254 | 3862.9 |
| 7 | 372.9 | 193.8 | 680.5 | 596.1 | 614.8 | 129.5 | 2.7 | 504.2 |
| 8 | 2363.3 | 511.5 | 342.5 | 363.9 | 358 | 497.4 | 221.6 | 355.6 |
| 9 | 381.6 | 1198.7 | 1487.5 | 781.6 | 985.4 | 2024.6 | 3933.7 | 1448.2 |
| 10 | 171.5 | 160.4 | 133.2 | 137.6 | 129.1 | 154.3 | 182.4 | 107 |
| 11 | 324 | 858.2 | 937 | 906.4 | 953.3 | 1879.7 | 1481 | 2251.2 |
| 13 | 126.1 | 303.3 | 531.1 | 319.9 | 664.9 | 496 | 223.2 | 472.7 |
| 14 | 295.2 | 932.1 | 1713.8 | 1521.7 | 2129.6 | 2134.5 | 1840.1 | 2225.4 |
| 15 | 95.6 | 2064.6 | 1333.1 | 540.9 | 265.7 | 569.7 | 709.8 | 1795.9 |
| 16 | 511.2 | 3919.7 | 2909.7 | 3131.8 | 3773.6 | 3125.2 | 3619.3 | 3331.5 |
| 17 | 214.6 | 800.5 | 1475.1 | 1075.3 | 1483.6 | 1162 | 1482.8 | 1281.8 |
| 19 | 198 | 274.5 | 768.1 | 268.8 | 208 | 509.4 | 276.1 | 570.1 |
| 20 | 1988.3 | 739.3 | 319.5 | 316.5 | 192 | 142.3 | 242.8 | 575.4 |
| 21 | 34.6 | 2492 | 1542.8 | 2495.1 | 1851.5 | 2668.6 | 1631.9 | 2770.3 |
| 22 | 1078.1 | 4211.3 | 4116 | 3543.7 | 3242.1 | 4723.4 | 3467.8 | 4881.8 |
| 23 | 1.1 | 825.2 | 1432.3 | 370.9 | 163.9 | 1192.4 | 221.9 | 1517 |
| 24 | 74.6 | 391.1 | 433 | 388.2 | 211.7 | 258.7 | 300.5 | 572.7 |
| 26 | 48.4 | 921.9 | 4466.3 | 587.5 | 349.2 | 1513.7 | 644.9 | 1870.3 |
| 27 | 495.1 | 654.3 | 1266.2 | 1076 | 1461.5 | 696.9 | 334.7 | 1531.4 |
| 29 | 381.5 | 152.8 | 91.8 | 35.9 | 162.7 | 135.1 | 152 | 238.5 |
| 30 | 31.3 | 686.6 | 444 | 223.3 | 222 | 321.8 | 356.5 | 825.6 |
| 31 | 635.6 | 18297.7 | 14048.6 | 8744.1 | 15394.7 | 17798.2 | 16472.5 | 12208.2 |
| 33 | 439.9 | 7923.9 | 4124.5 | 3804.6 | 3932.5 | 2361.7 | 3149.1 | 7173.6 |
| 34 | 3213.6 | 825.9 | 1104.9 | 697 | 285.8 | 603.4 | 436.7 | 1025.5 |
| 35 | 22.6 | 2143.6 | 1770.3 | 1187.9 | 1220.4 | 1620.3 | 1651.3 | 529 |
| 36 | 492.1 | 322.5 | 1635.1 | 387.3 | 554.6 | 818.8 | 268.4 | 1021.4 |
| 37 | 429.6 | 140.1 | 245.5 | 191.1 | 224.1 | 241.8 | 207.1 | 178.5 |
| 38 | 237.9 | 1844.2 | 2220.8 | 794.4 | 644.7 | 984 | 292.1 | 3477.4 |
| 40 | 451.5 | 617.3 | 495.8 | 1186.4 | 725.4 | 800.6 | 880.8 | 1036.1 |
| 41 | 252.1 | 1258.8 | 943 | 4956.1 | 2394.2 | 566.6 | 987.6 | 3025.4 |
| 42 | 579.4 | 532.8 | 258.1 | 1104 | 396.5 | 335.9 | 491.3 | 504 |
| 43 | 1029 | 384.9 | 273.6 | 344 | 416.5 | 403.9 | 517.2 | 325.7 |
| 44 | 565.3 | 1802.4 | 1501.6 | 1596.1 | 1100.9 | 1275.9 | 1583.2 | 1199 |
| 45 | 1500.8 | 1346.9 | 1175.4 | 1573.6 | 2053.9 | 971.8 | 332 | 1783.9 |
| 46 | 307.7 | 539 | 343 | 380.7 | 553.4 | 414.6 | 398.2 | 340.8 |
| 47 | 67.8 | 1213 | 521.9 | 742.8 | 498.1 | 507 | 1389.1 | 810.8 |
| 48 | 6.2 | 645.9 | 561.5 | 325.6 | 92.6 | 189.4 | 537.5 | 190.6 |
| 49 | 192.1 | 1573.1 | 2319.6 | 1719.2 | 1210.4 | 6469.1 | 1691.6 | 1799.3 |
| 50 | 2 | 1030.9 | 954.7 | 379.1 | 309.7 | 799.1 | 597.4 | 2116.3 |
| 51 | 772.5 | 259.7 | 304 | 170.3 | 108.1 | 1357.1 | 408.8 | 394.9 |
| 52 | 193.2 | 298.8 | 343.6 | 347.9 | 276 | 289.4 | 348.2 | 335.9 |
| 53 | 153.5 | 1632.6 | 2144.7 | 2293.9 | 2026.5 | 1732.8 | 446.5 | 1982.9 |
| 54 | 809.7 | 1147.3 | 1387.6 | 2014.6 | 1631.7 | 1524.6 | 1231.9 | 2093.8 |
| 55 | 147.7 | 86.2 | 101.7 | 108.3 | 85.2 | 103.3 | 116.6 | 62.5 |
| 56 | 130 | 94.8 | 277.7 | 121.8 | 341.8 | 98.5 | 180.9 | 241.4 |
| 57 | 777.3 | 1976.6 | 14161.4 | 3909.2 | 3643.6 | 667.8 | 1053.7 | 5922.8 |
| 58 | 1225.7 | 5418.7 | 14855.8 | 6952.4 | 4309.6 | 3516.6 | 6571.6 | 9242 |
| 59 | 271.6 | 3644.3 | 3754.4 | 4801.4 | 3817.3 | 6657.4 | 4444.2 | 3360.8 |
| 60 | 159.2 | 218.9 | 601.1 | 529.4 | 311.4 | 171.9 | 231.9 | 506.7 |
| 61 | 138.9 | 159.4 | 118.4 | 73.6 | 104.8 | 116.1 | 164.5 | 81.1 |
| 62 | 3244.1 | 5818 | 1646.1 | 2645.7 | 3666.2 | 3358 | 2535.7 | 4029.7 |
| 63 | 157.2 | 628.9 | 667.9 | 804.6 | 516.3 | 778 | 703.2 | 578.3 |
| 64 | 994.5 | 119.1 | 251.9 | 202.5 | 258.2 | 236.6 | 151.1 | 722.1 |
| 65 | 35.2 | 209.3 | 234.7 | 217.1 | 113.7 | 118.8 | 146.7 | 305.4 |
| 66 | 437.5 | 2105.5 | 1849.4 | 2646.8 | 2322.7 | 1754.7 | 1801.8 | 1830.2 |
| 67 | 13299.5 | 26691.3 | 29363.4 | 21948.4 | 30861.2 | 27520.3 | 32791 | 27456.3 |
| 68 | 1527.1 | 379.2 | 840.8 | 286.8 | 238.8 | 383.7 | 53.6 | 2104.6 |
| 69 | 5084.1 | 1418.5 | 1727.3 | 964.1 | 782.1 | 2036.1 | 478 | 3532.1 |
| 70 | 9067.8 | 5289.8 | 5151.5 | 5378.2 | 4923.7 | 7248.8 | 5765.7 | 6685.7 |
| 71 | 356.7 | 3218.2 | 6059.4 | 4739.2 | 7588 | 3114 | 2518 | 4665.5 |
| 72 | 126.9 | 2024.9 | 3174.2 | 2185.2 | 2596.3 | 2512.4 | 2145.9 | 1991.3 |
| 73 | 163.4 | 917.4 | 942.3 | 785.8 | 642.5 | 1021.7 | 1109.2 | 1059.2 |
| 75 | 234.3 | 480.2 | 1234.8 | 2124.7 | 1532.8 | 329.3 | 830.5 | 2611.1 |
| 76 | 1819.9 | 1037.3 | 1473 | 1162.8 | 2498.4 | 959.8 | 921.6 | 1764.5 |
| 77 | 5259 | 3101.8 | 1035.9 | 1814.1 | 885.5 | 1999.1 | 3528.7 | 1319.6 |
| 78 | 568.7 | 520.5 | 454.4 | 245.9 | 225.2 | 250.6 | 256.7 | 390.8 |
| 79 | 402.6 | 303.3 | 288.4 | 416.4 | 496.9 | 377.6 | 309.8 | 241.7 |
| 80 | 141.1 | 1486.2 | 1527.9 | 1160.9 | 747.9 | 1195.7 | 1756.4 | 792.8 |
| 81 | 189.9 | 13371 | 7841.3 | 9074.6 | 16493.4 | 8121 | 5097.9 | 11272.1 |
| 82 | 435.3 | 141.8 | 224.9 | 197.1 | 249.7 | 31 | 6.8 | 170.9 |
| 84 | 71.2 | 138.6 | 259.2 | 151.7 | 138.9 | 415.1 | 303 | 326.8 |
| 85 | 187.8 | 1315 | 612.4 | 336.4 | 240.8 | 318.3 | 399.8 | 1550.2 |
| 86 | 93.5 | 90.2 | 120.7 | 294.3 | 724.1 | 302.7 | 89.1 | 261.7 |
| 87 | 539.5 | 1122.1 | 581.5 | 1395.1 | 1476 | 1619.4 | 1043.7 | 2328.9 |
| 88 | 3161.6 | 561.1 | 1162.2 | 632.3 | 466 | 750.6 | 597.3 | 1050.6 |
| 89 | 317.9 | 237.2 | 318.3 | 196.3 | 337.5 | 343.7 | 255.7 | 239.7 |
| 90 | 111.8 | 266.6 | 953.6 | 334.9 | 123.2 | 226 | 325.2 | 129.6 |
| 91 | 1023.4 | 3728.1 | 4506.6 | 4033.4 | 2043.2 | 2095 | 2191.9 | 3082.3 |
| 92 | 2374.9 | 4865.1 | 6296.6 | 8454.9 | 11642.6 | 11587.7 | 9943.6 | 10568 |
| 93 | 103.8 | 133.1 | 109.8 | 121.6 | 41.7 | 69.9 | 17.1 | 166 |
| 94 | 59.2 | 296.8 | 784.9 | 944.1 | 600.5 | 776.8 | 481.1 | 1257.8 |
| 95 | 69 | 126.3 | 450.5 | 453.8 | 310.8 | 189.3 | 165.4 | 142.4 |
| 96 | 147.8 | 682.4 | 387.8 | 387.3 | 404.3 | 357.9 | 565.3 | 420.4 |
| 97 | 204.3 | 883.1 | 454.1 | 708.8 | 421.4 | 468 | 686.4 | 732.8 |
| 98 | 728.4 | 10.5 | 42.6 | 72.2 | 43.5 | 29.7 | 53 | 36.4 |
| 99 | 210.6 | 821.1 | 369.4 | 814.2 | 595.6 | 485.9 | 696.6 | 541.1 |
| 100 | 995.9 | 102.8 | 3585.7 | 89.5 | 34.3 | 2798.5 | 112 | 3456 |
| 101 | 133.4 | 146.6 | 270.3 | 174.9 | 310.3 | 198.2 | 121.7 | 192.7 |
| 102 | 190.6 | 110.7 | 244 | 152.9 | 172.3 | 180.7 | 158 | 123.8 |
| 103 | 379.6 | 430.7 | 535.3 | 399.6 | 560.3 | 572.8 | 586.9 | 406.8 |
| 104 | 252 | 69.6 | 93.2 | 189.4 | 28.6 | 67.4 | 16.2 | 92.3 |
| 105 | 363.6 | 168.9 | 116.4 | 217.8 | 70.2 | 146.4 | 118.2 | 171.8 |
| 106 | 442.3 | 95.1 | 136.6 | 154 | 56.3 | 79.8 | 12.9 | 109.4 |
| 107 | 301 | 538.7 | 356.6 | 408.6 | 301.5 | 322.4 | 420.8 | 596.8 |
| 108 | 255.8 | 236.3 | 168 | 137.3 | 106.8 | 179.7 | 237 | 170.7 |
| 109 | 169.9 | 1482.1 | 544.7 | 1597 | 294.1 | 1205.6 | 1691 | 683.9 |
| 110 | 322.7 | 1903.7 | 1404.2 | 4278.2 | 691.9 | 2791.8 | 2817.9 | 2504.6 |
| 111 | 252.7 | 25.4 | 233.3 | 24.4 | 63.4 | 101.2 | 47.1 | 118.3 |
| 112 | 633.2 | 1314.2 | 1405.6 | 2124.5 | 1859.3 | 1085.3 | 587.6 | 1601.9 |
| 113 | 164.4 | 330.6 | 333.5 | 268.5 | 218.6 | 285.2 | 237.3 | 350.6 |
| 114 | 88.6 | 309.3 | 1164.6 | 333.2 | 513.7 | 630.7 | 664.7 | 778.3 |
| 115 | 326.5 | 1299.5 | 1101.1 | 1198.8 | 1051.2 | 817.4 | 1102.2 | 1084.6 |
| 116 | 252.3 | 360.5 | 666.1 | 1347.3 | 817.6 | 327.9 | 554.6 | 825.9 |
| 117 | 42.1 | 101.1 | 493.9 | 114.6 | 74 | 399.7 | 133.8 | 234.5 |
| 118 | 1176.7 | 116.7 | 300.6 | 130.5 | 200.8 | 470.8 | 207.3 | 112.5 |
| 119 | 98.3 | 184.2 | 281.1 | 245.5 | 317.6 | 213 | 191.2 | 336 |
| 120 | 99.5 | 98.8 | 155.8 | 124.7 | 95.6 | 98.9 | 123.9 | 78.9 |
| 121 | 234.8 | 2992.4 | 4320.2 | 4055.8 | 3020 | 5336.5 | 3158.4 | 5803.1 |
| 122 | 645.9 | 446.7 | 248.2 | 356.4 | 312.1 | 428.7 | 329.5 | 346.1 |
| 123 | 300.8 | 313.4 | 352.6 | 504.1 | 413.5 | 386.8 | 444 | 417.5 |
| 124 | 4390.2 | 96.1 | 118.6 | 125.8 | 161.7 | 134.4 | 182.6 | 94.9 |
| 125 | 1484.8 | 805.4 | 27732 | 982.2 | 7375.5 | 984.2 | 1310.9 | 807.1 |
| 126 | 278.6 | 56.9 | 192.9 | 24.9 | 31.8 | 77.8 | 104.9 | 66.8 |
| 127 | 114.5 | 332.1 | 225.5 | 171.6 | 237.5 | 193.8 | 339.3 | 225.1 |
| 128 | 318.6 | 181.2 | 386.4 | 213 | 69850.3 | 108521.8 | 356.1 | 93954.5 |
| 129 | 176.1 | 1916.3 | 1120.7 | 2375.9 | 2049.1 | 1464.3 | 1602.6 | 1660 |
| 130 | 114.6 | 735.8 | 381 | 595.7 | 599.3 | 446.9 | 434.4 | 456.6 |
| 131 | 236.1 | 156.9 | 297.1 | 426.8 | 385.2 | 268.2 | 149.3 | 279.8 |
| 132 | 169.8 | 303.3 | 464.3 | 423.7 | 368.6 | 256 | 428.6 | 304.5 |
| 133 | 102.5 | 245.3 | 224.6 | 394 | 186.7 | 265.2 | 300 | 269.3 |
| 134 | 175.1 | 516.6 | 316.3 | 534.3 | 524 | 626.6 | 679.7 | 687.4 |
| 135 | 170 | 964.7 | 971.6 | 756.7 | 562.2 | 683.1 | 1544.5 | 931 |
| 138 | 145.9 | 173.1 | 201.3 | 127.5 | 189.1 | 187.4 | 173.9 | 166 |
| 139 | 66.8 | 286.4 | 170 | 167 | 270.8 | 159 | 281 | 340.1 |
| 140 | 26 | 16.5 | 135.6 | 163.6 | 1.2 | 183.8 | 98.2 | 1064.1 |
| 141 | 407.3 | 178 | 380.3 | 594.8 | 275 | 1127.7 | 586.1 | 346.3 |
| 144 | 370.2 | 23200.8 | 7070.4 | 20031.2 | 20055.7 | 5695.1 | 21008 | 16416.4 |
| 145 | 203 | 197.5 | 215.6 | 241.1 | 234 | 295.8 | 284.7 | 197.3 |
| 146 | 299.6 | 606.7 | 853.8 | 1054.9 | 249.3 | 683.3 | 966.5 | 411.5 |
| 147 | 34.5 | 138.1 | 361.4 | 219.1 | 120.1 | 69 | 110.2 | 51.6 |
| 148 | 200.3 | 1072.9 | 641.5 | 371.8 | 309.3 | 1298 | 734.4 | 563.6 |
| 149 | 147.1 | 811.8 | 330.1 | 243.5 | 389.9 | 584.1 | 960.6 | 374.5 |
| 150 | 243.6 | 194.2 | 614.8 | 339.8 | 227.4 | 390.5 | 510.2 | 508.8 |
| 151 | 103.4 | 200.9 | 536 | 659.6 | 1097.9 | 831.2 | 572.5 | 1463 |
| 153 | 102.7 | 134.4 | 117.8 | 319.9 | 659.8 | 147 | 158.2 | 276.8 |
| 154 | 64.7 | 5340.9 | 7684.3 | 4496.6 | 6819 | 3595.6 | 1313.4 | 7444 |
| 155 | 155.1 | 604.1 | 224.8 | 527.6 | 443.5 | 980.8 | 352 | 708.4 |
| 156 | 117.9 | 162.1 | 382.4 | 213.5 | 503.7 | 174 | 219.3 | 257.1 |
| 157 | 134.1 | 215.4 | 212.5 | 227.7 | 257.4 | 258.4 | 309.6 | 331.4 |
| 158 | 857.5 | 149.9 | 598.8 | 544.5 | 850.2 | 506.6 | 301.4 | 728.3 |
| 159 | 1385.8 | 1366 | 1517.3 | 1101.7 | 1387.1 | 1799.8 | 2020.5 | 1476 |
| 161 | 950.1 | 6758.6 | 7657.2 | 10885 | 16984 | 4705.2 | 7562.3 | 6065.7 |
| 162 | 12.5 | 256.2 | 584.1 | 235.7 | 456.1 | 369.3 | 231.2 | 451.5 |
| 164 | 47.5 | 347.7 | 1040.5 | 4140.2 | 1526.9 | 2205.5 | 1430.7 | 7468.9 |
| 166 | 4175.2 | 1086.4 | 1301.1 | 700.5 | 641.4 | 1360.7 | 585.8 | 1191.3 |
| 167 | 545.5 | 254.9 | 1335.1 | 355.9 | 1787.4 | 118.5 | 231.5 | 771.1 |
| 168 | 140.6 | 1535.5 | 1213 | 549.9 | 594.1 | 1616.8 | 2190.3 | 639.2 |
| 169 | 582.9 | 12292.6 | 13216.5 | 15240.1 | 14867.1 | 7648.8 | 9941.3 | 13159.9 |
| 170 | 857.8 | 2119.5 | 2344.7 | 3361.9 | 2260.9 | 2642.5 | 1920 | 3323.2 |
| 171 | 1.1 | 1063.9 | 967.8 | 79.8 | 105 | 514 | 339.5 | 801 |
| 172 | 489.3 | 575.3 | 552.3 | 483.9 | 608.6 | 582.7 | 664.1 | 514.2 |
| 173 | 168.3 | 410.3 | 1713.9 | 878.7 | 690.8 | 1123.5 | 254.3 | 2373.9 |
| 176 | 50.7 | 173.8 | 993.1 | 155.4 | 1107.2 | 1814.1 | 400.9 | 1423.1 |
| 177 | 610.5 | 234 | 350.8 | 201.7 | 455.2 | 147.8 | 113.6 | 315.4 |
| 178 | 670.2 | 457.3 | 1924 | 1409.8 | 1033.8 | 1365.3 | 281.5 | 700.6 |
| 179 | 188.9 | 540.8 | 1136 | 1826.7 | 836.8 | 964.6 | 165.7 | 1383.2 |
| 180 | 208.1 | 750.5 | 880.8 | 997.3 | 460.6 | 628.8 | 717.2 | 618.1 |
| 181 | 9102.8 | 4805.7 | 6228.9 | 4111.8 | 3157.6 | 5112.8 | 5426.8 | 4235.7 |
| 182 | 244.4 | 524.8 | 434.5 | 395.3 | 395.9 | 340.8 | 570.4 | 455 |
| 183 | 1.1 | 286.3 | 920.2 | 156 | 69.6 | 540.1 | 211.4 | 691 |
| 184 | 202.5 | 365.3 | 361.1 | 2170.5 | 3042.7 | 341.2 | 479.3 | 909.8 |
| 185 | 707.4 | 2338.2 | 5269.7 | 5295.8 | 3116 | 6542.9 | 3238.5 | 6677.1 |
| 186 | 1338.6 | 98.2 | 262.6 | 165.5 | 183.3 | 170.6 | 131.9 | 218.6 |
| 187 | 301.2 | 421.4 | 792.2 | 247.6 | 123.3 | 291.1 | 366.9 | 720.2 |
| 188 | 54.4 | 507.9 | 399.8 | 687.8 | 469.2 | 348.4 | 605.1 | 684.6 |
| 189 | 68.7 | 209 | 287.2 | 379.3 | 305.1 | 161.4 | 160.7 | 404.9 |
| 190 | 199.8 | 242.2 | 483.5 | 455.5 | 631.9 | 241 | 71.1 | 375.7 |
| 191 | 1726.7 | 4039 | 3532.7 | 2210.1 | 1524.2 | 4609 | 6889.4 | 3737.3 |
| 192 | 89.6 | 89.6 | 157.2 | 211.4 | 92.6 | 233.7 | 145.8 | 105.4 |
| 193 | 85 | 216.9 | 219.4 | 119.4 | 69.2 | 392.2 | 176.5 | 239.5 |
| 194 | 49.9 | 282 | 251.7 | 297.8 | 199.9 | 135 | 172.5 | 243.3 |
| 195 | 712.1 | 117.7 | 174.3 | 152.9 | 85.3 | 174.3 | 73.7 | 152.1 |
| 196 | 2873.3 | 845.8 | 1650.6 | 1499.5 | 1608.9 | 962 | 584.5 | 1404 |
| 197 | 483.3 | 253.5 | 190.9 | 146 | 112.4 | 139 | 144.8 | 141.2 |
| 198 | 126.6 | 4231 | 1176.9 | 1159.9 | 1263.8 | 999 | 925 | 2035.1 |
| 199 | 87.2 | 9967.3 | 4014.3 | 8315.9 | 19492.1 | 4175.4 | 4540.2 | 17229.4 |
| 200 | 344.7 | 460.3 | 1008.1 | 823.2 | 437.1 | 394.5 | 655.2 | 945.4 |
| 201 | 122.7 | 1085.1 | 434.8 | 378.2 | 229.8 | 766.3 | 506.3 | 515.7 |
| 203 | 678.5 | 1088.3 | 1322.9 | 1133.7 | 3167.7 | 436.2 | 563 | 3185.7 |
| 204 | 634.2 | 3003.4 | 1397.7 | 1339.9 | 1300.3 | 1299.2 | 2900.2 | 1073 |
| 205 | 946.3 | 5589.7 | 3415.4 | 3931.9 | 4602.2 | 5034.5 | 4943.8 | 6059.1 |
| 206 | 278.8 | 299.7 | 268.4 | 293.8 | 350.2 | 398.3 | 635.4 | 241.1 |
| 207 | 125.7 | 79.6 | 212.3 | 46.6 | 106.6 | 58.1 | 57.3 | 679.7 |
| 208 | 5.4 | 3861.8 | 679.2 | 3099.7 | 462.3 | 711 | 799 | 604.6 |
| 209 | 648.2 | 26.6 | 610.8 | 71.6 | 104.3 | 77.3 | 72 | 161.4 |
| 211 | 5817.8 | 134.3 | 575.9 | 84.6 | 135.1 | 1200.4 | 233.2 | 1507.1 |
| 212 | 1458.6 | 689.4 | 1135 | 1092.6 | 988.6 | 986.3 | 460.6 | 1341.5 |
| 213 | 7576.6 | 117.6 | 121.9 | 100.6 | 96.3 | 151.6 | 183.1 | 136.2 |
| 215 | 71.8 | 73.2 | 323.2 | 71.1 | 161.2 | 100.5 | 30.8 | 676.7 |
| 216 | 415.9 | 276.5 | 268.1 | 173.7 | 199.3 | 277.1 | 434.2 | 282.3 |
| 217 | 78.7 | 959.5 | 2746.7 | 1024.9 | 2616.6 | 671.5 | 359.6 | 850.8 |
| 218 | 268.3 | 172.1 | 161.1 | 189.2 | 123.2 | 160.7 | 128.5 | 186.8 |
| 220 | 134.5 | 72.8 | 184.9 | 96.1 | 84.3 | 650.4 | 100.4 | 81.9 |
| 221 | 207.5 | 1438 | 1268.5 | 2111.3 | 963.7 | 1155.3 | 1048.4 | 1581.4 |
| 223 | 308.1 | 673.6 | 497.3 | 535.5 | 748.5 | 534.7 | 710.2 | 869.9 |
| 227 | 474 | 3740.6 | 3123.8 | 1451.8 | 740.1 | 1207.8 | 1221.4 | 3703.7 |
| 228 | 553.9 | 202.8 | 342.4 | 247.9 | 322.9 | 245.3 | 315.9 | 260.5 |
| 229 | 978.6 | 365 | 204.1 | 229.3 | 104.9 | 176.7 | 197.5 | 149.4 |
| 230 | 157 | 4381.3 | 4364.6 | 3469 | 4117.2 | 2984.9 | 4092.3 | 2935.6 |
| 231 | 299.2 | 338.1 | 519.6 | 436.9 | 1304.6 | 261.4 | 183.1 | 1209.9 |
| 232 | 1.2 | 479.7 | 2967.9 | 397.7 | 283.8 | 1161.6 | 447.9 | 1442.7 |
| 233 | 1408.3 | 17920.3 | 13126.5 | 7241.8 | 19318.8 | 13487.2 | 18348.9 | 15152.5 |
| 235 | 22.6 | 659.3 | 624.9 | 172.2 | 155.8 | 342.8 | 152.7 | 485.3 |
| 236 | 244.8 | 153.5 | 397.3 | 304.6 | 449.7 | 331.3 | 200.6 | 282.5 |
| 237 | 841.8 | 1675 | 2348.2 | 1931.5 | 1633.1 | 2253.2 | 749.1 | 1687.1 |
| 238 | 606.8 | 847.7 | 670.6 | 582.6 | 625.6 | 723.4 | 726.5 | 667.2 |
| 239 | 455.9 | 304.4 | 1179.8 | 492.8 | 201.3 | 464.9 | 311.9 | 376.9 |
| 240 | 756.3 | 795.3 | 1590.4 | 747.3 | 330.3 | 1193.3 | 846 | 709.6 |
| 241 | 1604.8 | 957.3 | 2984.8 | 1412.5 | 619.3 | 2269.1 | 981.8 | 1321 |
| 242 | 13722.5 | 46283.3 | 32477.3 | 33142.3 | 38026.7 | 42087.5 | 49249 | 39172.5 |
| 243 | 322.6 | 586.6 | 483.3 | 483.6 | 499.4 | 723.7 | 534 | 603.1 |
| 244 | 80.8 | 1208.5 | 771.3 | 1636.9 | 1032.2 | 928.2 | 507.9 | 553.8 |
| 246 | 167.7 | 2506.3 | 1683.7 | 2500.3 | 1675.8 | 557.3 | 1133.6 | 1677.5 |
| 247 | 116.8 | 115.5 | 128.4 | 104.8 | 125.8 | 135.7 | 147.3 | 96.5 |
| 248 | 309.3 | 1728.9 | 1916.3 | 3434.3 | 3874.7 | 1004.6 | 2401.7 | 5089.3 |
| 249 | 432 | 681.6 | 804.8 | 479.8 | 417.3 | 1208.2 | 1265.1 | 742.5 |
| 251 | 134 | 671 | 368.8 | 2493.8 | 784.3 | 1646.7 | 587.9 | 1794.9 |
| 253 | 375.8 | 544.2 | 623.3 | 589.2 | 333.1 | 383.4 | 859.9 | 310.8 |
| 254 | 716.8 | 989.8 | 1029.3 | 1067.7 | 790.5 | 817 | 991.7 | 1396.7 |
| 255 | 777.9 | 706 | 2286.6 | 1766.1 | 1100.5 | 1765.9 | 286 | 948.3 |
| 256 | 645.4 | 3136 | 3129.7 | 3456.4 | 1905.4 | 1995.5 | 3000.3 | 2611 |
| 257 | 107.8 | 348.2 | 360.1 | 289.9 | 300.9 | 240.8 | 403 | 750 |
| 258 | 83.1 | 3074.5 | 844.5 | 2046.8 | 1476.7 | 3628.7 | 3511.2 | 2536.1 |
| 259 | 1.2 | 668.5 | 1027.2 | 351 | 524.2 | 1117.3 | 356.7 | 500 |
| 260 | 185.4 | 108.7 | 158.6 | 251.8 | 168.6 | 182 | 256.7 | 116.2 |
| 261 | 73.8 | 130.7 | 187.3 | 61.6 | 210.2 | 242.6 | 130.1 | 258.1 |
| 263 | 919.6 | 1233.9 | 819.4 | 1299.4 | 572.7 | 912.1 | 1233 | 872.7 |
| 263 | 199.8 | 4626.1 | 3402.3 | 3087.9 | 3813.2 | 3582 | 6403.5 | 3036.9 |
| 265 | 310 | 125 | 156 | 135.2 | 128.1 | 234.7 | 96.8 | 155.8 |
| 266 | 381.6 | 899.6 | 433.3 | 530.4 | 242.9 | 358.6 | 641.2 | 241.1 |
| 256 | 130.8 | 141.8 | 211.4 | 344.3 | 408.2 | 195.6 | 211 | 388.4 |
| 268 | 155.9 | 135.7 | 783.8 | 251.7 | 990.9 | 145.6 | 77.9 | 262.5 |
| 269 | 70.4 | 137.9 | 127.4 | 87.5 | 920.7 | 144.7 | 106.4 | 123.1 |
| 270 | 906 | 197.1 | 177.3 | 148.3 | 194.1 | 214.8 | 161.2 | 198.9 |
| 271 | 197.7 | 411.2 | 613.2 | 278.3 | 1153.3 | 2568.1 | 824.5 | 1254.6 |
| 272 | 530.2 | 865.4 | 861.9 | 814.5 | 776.6 | 929.7 | 1402.4 | 1012 |
| 273 | 2.1 | 207.7 | 884.3 | 165.7 | 2070.8 | 969.7 | 200.6 | 1967.3 |
| 274 | 1050.2 | 932.1 | 1127.6 | 1151.3 | 1481.1 | 2100.5 | 1603.4 | 1010.4 |
| 275 | 277.8 | 674 | 1507.8 | 1511.2 | 956.4 | 1603.8 | 960.9 | 2338.9 |
| 276 | 496.5 | 4907.8 | 5071 | 1824.8 | 921.9 | 1584.4 | 1043 | 6199.7 |
| 277 | 159.6 | 251.2 | 318.9 | 445.6 | 355.2 | 318.1 | 503.6 | 277.7 |
| 278 | 15.3 | 1224.6 | 1434.2 | 602.7 | 1133.3 | 1898 | 1401.1 | 984.1 |
| 279 | 678.5 | 1074.4 | 1101.7 | 1030.5 | 1878 | 1425 | 1541.1 | 2160.3 |
| 280 | 1096.5 | 3203.9 | 2152.5 | 2126.2 | 3768.5 | 4309.6 | 7516.9 | 4768.7 |
| 281 | 38.3 | 590.9 | 605.4 | 938.5 | 832.1 | 257.9 | 315.3 | 385.4 |
| 282 | 407.5 | 416.5 | 704.2 | 1079.1 | 1604.5 | 485.4 | 482.3 | 1146.7 |
| 283 | 603.1 | 605 | 593.6 | 521.9 | 638.2 | 488.6 | 789.7 | 516.5 |
| 284 | 131.4 | 59.7 | 136.2 | 49.9 | 188.8 | 106.8 | 101.5 | 85 |
| 285 | 154.1 | 117 | 110.9 | 109.1 | 135.7 | 131.9 | 163 | 116 |
| 286 | 530.4 | 43.8 | 59.5 | 27.7 | 22.9 | 109.8 | 66.7 | 34.6 |
| 287 | 102.4 | 116.9 | 133.6 | 99.1 | 113.6 | 295 | 171.3 | 79.7 |
| 288 | 160.1 | 126.6 | 179.5 | 153.3 | 164.7 | 202.8 | 216.9 | 139.7 |
| 289 | 1536.2 | 4488.8 | 4944.9 | 1532.8 | 3646.8 | 5911.3 | 4344.5 | 8246.5 |
| 291 | 102.7 | 248.4 | 286.1 | 208.5 | 228.9 | 130.1 | 253.2 | 374 |
| 292 | 42.7 | 732.8 | 8793.1 | 18089.3 | 3318.5 | 3787.1 | 10588.9 | 8088.8 |
| 293 | 271.4 | 344.8 | 740.3 | 493 | 462.9 | 499.8 | 453.7 | 383.2 |
| 295 | 727.5 | 890.4 | 2593.2 | 1314 | 3115.5 | 310.9 | 729.5 | 1143.9 |
| 296 | 887.9 | 2346.4 | 1719.1 | 1863.5 | 1576.8 | 2166.6 | 2085.1 | 1930.4 |
| 297 | 96.5 | 59.7 | 110.1 | 83.1 | 71.1 | 60.1 | 112 | 82.2 |
| 298 | 546.1 | 730.6 | 785.4 | 968.7 | 730.8 | 563 | 1034.8 | 859.8 |
| 299 | 691.2 | 3305.3 | 2824.9 | 5439.5 | 1735.1 | 1756.8 | 2682.4 | 4873.4 |
| 300 | 323.5 | 1392.4 | 991.4 | 1256.6 | 1607.8 | 1164.4 | 1068.3 | 1558.2 |
| 301 | 728.3 | 209.7 | 186.7 | 221.8 | 162.3 | 294.8 | 281.5 | 306.3 |
| 302 | 7.7 | 347.9 | 205.9 | 264.9 | 249.4 | 213.4 | 340.1 | 128.4 |
| 303 | 488.4 | 309.5 | 299.3 | 350 | 256.8 | 366.4 | 288.4 | 319.4 |
| 304 | 190.4 | 376.7 | 480.7 | 406.4 | 314.9 | 1106.8 | 764.9 | 973.2 |
| 305 | 478.8 | 246.1 | 628.7 | 2896.4 | 633.1 | 802.4 | 305.6 | 892.8 |
| 306 | 159.1 | 618.4 | 450.3 | 475.8 | 439.9 | 1419.5 | 763.8 | 450.3 |
| 307 | 132.8 | 254.7 | 425.8 | 462.3 | 354.6 | 254.6 | 307.1 | 237 |
| 308 | 5822.9 | 744.5 | 524.5 | 787 | 589.2 | 606.8 | 354.7 | 424.9 |
| 310 | 1068.6 | 151.4 | 133.4 | 116.4 | 77.7 | 177.3 | 68 | 124.3 |
| 311 | 36.2 | 641.7 | 499 | 622.8 | 349.4 | 351.8 | 356 | 454.7 |
| 312 | 4778.5 | 245 | 143.2 | 236.8 | 4.3 | 250.7 | 224.5 | 335 |
| 313 | 136.4 | 173 | 383.6 | 419 | 537.8 | 354.8 | 230.1 | 549.2 |
| 314 | 485.9 | 926.3 | 1589 | 956.6 | 1048.3 | 1458.6 | 629.4 | 877.4 |
| 315 | 125.9 | 82.4 | 187.2 | 88 | 58.7 | 77 | 93.2 | 43.3 |
| 316 | 367.6 | 574.4 | 633.7 | 462.8 | 337.8 | 583 | 763.4 | 450.7 |
| 317 | 145.2 | 202 | 1956.5 | 215.8 | 199.9 | 250.1 | 242.6 | 647.4 |
| 318 | 22.4 | 277.6 | 212 | 450.5 | 289.2 | 439.1 | 285.9 | 458.3 |
| 319 | 1838.4 | 512.3 | 276.4 | 733 | 268.8 | 487.6 | 670 | 354.9 |
| 320 | 477 | 181.1 | 267.8 | 128.4 | 160.8 | 244 | 142.2 | 214.4 |
| 321 | 718.7 | 163.3 | 292.4 | 134.5 | 159.2 | 263 | 227.2 | 257.6 |
| 322 | 440.4 | 379.6 | 285.7 | 360.6 | 238.3 | 342.7 | 305 | 208.4 |
| 323 | 1582.3 | 3954.1 | 3885.8 | 3447.2 | 3490.5 | 3121.3 | 3460.9 | 3724.3 |
| 324 | 112.2 | 445.5 | 257.9 | 704.3 | 519.5 | 235.2 | 528.1 | 737.5 |
| 325 | 190.1 | 374.9 | 430.9 | 503.9 | 541.5 | 326.1 | 367.3 | 610.4 |
| 326 | 422.9 | 4053.9 | 6121.7 | 4456.6 | 1364.3 | 5707.5 | 3498.2 | 4848.9 |
| 327 | 5.6 | 292.7 | 203.1 | 609.7 | 707.7 | 133.8 | 263.6 | 273.5 |
| 328 | 72.2 | 52 | 299.8 | 94.6 | 299.9 | 87.1 | 27.6 | 114.9 |
| 329 | 216.1 | 65.5 | 49.1 | 96.4 | 60.5 | 118.7 | 102.7 | 76.4 |
| 330 | 74.1 | 438.1 | 1060 | 824 | 632 | 896 | 708.8 | 558.4 |
| 331 | 783.2 | 297.5 | 466.2 | 372.3 | 422.4 | 374.2 | 562 | 297.2 |
| 333 | 216.1 | 167.4 | 206.9 | 194.6 | 174.5 | 38.1 | 190.6 | 149.2 |
| 334 | 107.8 | 126.8 | 470.1 | 153.1 | 513.7 | 220 | 141.5 | 193.3 |
| 335 | 570.7 | 191.9 | 697.3 | 783.9 | 505.5 | 208 | 243.3 | 414.7 |
| 336 | 491.6 | 342.6 | 210.4 | 272.6 | 218 | 256.8 | 428.3 | 243 |
| 337 | 127.4 | 619.5 | 632.8 | 711.3 | 511.9 | 972.3 | 606.6 | 804.8 |
| 338 | 180.6 | 1559 | 1838 | 1292.5 | 2158.9 | 837.9 | 1460.8 | 1632.3 |
| 339 | 303.9 | 217.3 | 347.8 | 220 | 329.4 | 258.1 | 219.3 | 184.2 |
| 340 | 185.5 | 137573.8 | 177311.9 | 54500.9 | 184533.6 | 59673.9 | 314613.6 | 86723.1 |
| 341 | 412.2 | 585 | 708 | 530.7 | 576.4 | 437.9 | 557.3 | 684.6 |
| 343 | 7951.1 | 2880.9 | 1575.6 | 1520.5 | 3477.9 | 2425 | 2379.2 | 1087.2 |
| 344 | 1755.5 | 649.1 | 436.9 | 434.5 | 285.2 | 463.7 | 452.7 | 599.1 |
| 345 | 236.2 | 296.5 | 511.3 | 662 | 580.8 | 429.8 | 424.2 | 488.6 |
| 347 | 821.3 | 1063 | 3642.7 | 1447.8 | 4119.2 | 1163.9 | 1210.2 | 1782.6 |
| 348 | 1679 | 4474.7 | 7575.3 | 4999.7 | 6225.7 | 3803.1 | 3979.1 | 4537.5 |
| 349 | 256.8 | 526.7 | 376.5 | 477.4 | 483.9 | 423.5 | 503.2 | 641.4 |
| 350 | 210.5 | 768.8 | 682.2 | 677.9 | 628.8 | 579 | 671.7 | 500.6 |
| 351 | 119.8 | 929.5 | 1553 | 2794.5 | 1558.8 | 1728.2 | 788.7 | 1446.6 |
| 352 | 435.7 | 264.1 | 190.3 | 177.4 | 180.3 | 233.4 | 304.2 | 190.7 |
| 353 | 385 | 500.7 | 566.6 | 574.8 | 346.1 | 382.1 | 487.3 | 473 |

3f

| SEQ ID | | | | | | | | |
|---|---|---|---|---|---|---|---|---|
| NO: | 892TT | 893TT | 894TT | 896TT | 898TT | 899TT | 900TT | 901TT |
| 354 | 838.5 | 571.4 | 438.3 | 31.6 | 78.4 | 438.1 | 332.3 | 995.7 |
| 355 | 5801.6 | 1326.3 | 4267.6 | 187.6 | 121 | 2990.3 | 3907.9 | 3595.2 |
| 356 | 672.9 | 416.1 | 1076.3 | 2648.9 | 200.3 | 682.2 | 309.3 | 200.9 |
| 357 | 815.8 | 844.6 | 869 | 1303.9 | 212 | 719.3 | 729.3 | 131.3 |
| 358 | 1742.6 | 1693.2 | 2440.3 | 1481.7 | 366.4 | 2077.8 | 2415.2 | 704.2 |
| 359 | 186 | 222.6 | 304.4 | 405.5 | 466.7 | 343.4 | 245.5 | 236.6 |
| 362 | 2087.5 | 1335.3 | 1239.7 | 326.8 | 171.4 | 870.6 | 879.2 | 101.1 |
| 360 | 472.7 | 502.8 | 559.4 | 1042.8 | 290.1 | 549.2 | 506 | 174.5 |
| 361 | 390.4 | 80 | 162.4 | 329.8 | 212.1 | 162.1 | 138.5 | 149.9 |
| 363 | 335.6 | 549.7 | 748.6 | 666.9 | 742.2 | 461 | 356.5 | 506.8 |
| 1 | 1364 | 864.1 | 2300.1 | 1111.5 | 725.5 | 1891.2 | 735.8 | 1211.8 |
| 2 | 8223.2 | 2863.6 | 1612.1 | 3492.1 | 669.6 | 1116 | 3477.7 | 10076.1 |
| 7 | 621.3 | 68.9 | 83.5 | 28.3 | 339.5 | 548.2 | 237.7 | 108.6 |
| 8 | 434.3 | 297.2 | 236.7 | 314.4 | 1057.9 | 469 | 735.8 | 1382.2 |
| 9 | 2209.5 | 1428.7 | 2874.5 | 9019.8 | 219.4 | 1483.2 | 931.8 | 299 |
| 10 | 87.4 | 318.6 | 123 | 113.9 | 359.9 | 132.2 | 797.4 | 116.1 |
| 11 | 2437.4 | 1234.9 | 867.7 | 1328.7 | 332.7 | 722 | 898.4 | 645.5 |
| 13 | 397 | 162.2 | 347.3 | 290.4 | 118.5 | 313.3 | 718 | 1070.4 |
| 14 | 2294.4 | 977.8 | 1525.3 | 1055.3 | 256.2 | 1105.9 | 2608.5 | 4093.2 |
| 15 | 828.3 | 416.9 | 482.6 | 728.2 | 16.4 | 502.2 | 3166.5 | 179.1 |
| 16 | 3234 | 2475.7 | 4710 | 1027.1 | 239.9 | 3055.6 | 4422.5 | 721.2 |
| 17 | 2718.1 | 742.6 | 607.2 | 522 | 240.9 | 762.6 | 1568.9 | 129.7 |
| 19 | 1086.6 | 248.6 | 333.5 | 226.7 | 290.8 | 444.8 | 7182.8 | 1716.2 |
| 20 | 192.8 | 641.7 | 12.5 | 39 | 1.2 | 792.4 | 372.3 | 36.3 |
| 21 | 1826.1 | 4120.6 | 1923.8 | 941.2 | 238.4 | 2518.7 | 2236.8 | 94.6 |
| 22 | 8192.1 | 2215.6 | 1368.7 | 1592.1 | 753.1 | 5336.9 | 2477.2 | 299.2 |
| 23 | 687.5 | 415.7 | 227.3 | 1.1 | 1.1 | 709.6 | 2476.1 | 179.7 |
| 24 | 326.7 | 113.9 | 163.5 | 127.1 | 110.4 | 165 | 803.4 | 105 |
| 26 | 1128.9 | 408.7 | 398.2 | 63.7 | 106.1 | 1433.6 | 5983.2 | 1234.8 |
| 27 | 1213 | 865.2 | 488.6 | 772.5 | 725.7 | 1107.3 | 619.8 | 58.3 |
| 29 | 134.2 | 85.5 | 245.2 | 242.8 | 215.1 | 196.6 | 356.2 | 198.7 |
| 30 | 362.2 | 248.6 | 151.7 | 102.9 | 16.7 | 261.5 | 1169.1 | 236 |
| 31 | 9692.5 | 20154 | 18540.6 | 1550.9 | 250.2 | 15669.5 | 3557.5 | 5.2 |
| 33 | 1841.1 | 2277.7 | 1079.8 | 442.8 | 137.2 | 3329.2 | 14318.3 | 588.8 |
| 34 | 826.4 | 839.3 | 441.4 | 624 | 4011.4 | 566.1 | 579.8 | 2078.9 |
| 35 | 1512.1 | 1217.1 | 1163.2 | 194.2 | 132.8 | 1055.6 | 1451.8 | 26.9 |
| 36 | 2188 | 735.7 | 379.8 | 646.9 | 507.5 | 1041.8 | 675.2 | 8116.1 |
| 37 | 133.7 | 152.8 | 191.6 | 188 | 737.6 | 240.4 | 318.6 | 263.7 |
| 38 | 776.1 | 895.4 | 248.4 | 519.4 | 99.4 | 1003.5 | 6688.2 | 339.4 |
| 40 | 910.9 | 789.8 | 648.8 | 518.5 | 810.2 | 652.7 | 553.1 | 417.3 |
| 41 | 922.5 | 3053 | 1250.6 | 119.4 | 254.6 | 779.1 | 3979.3 | 333.2 |
| 42 | 343.8 | 889 | 400.7 | 444.1 | 260.1 | 318.1 | 535.4 | 200.6 |
| 43 | 219.4 | 422 | 417 | 1244.1 | 1305.2 | 310.9 | 593.5 | 1335.2 |
| 44 | 1388 | 1454.8 | 1175.7 | 1009.9 | 401.4 | 945.2 | 1312.6 | 316.6 |
| 45 | 1335.6 | 1007.6 | 839.8 | 405.9 | 730.7 | 1723.4 | 1554 | 740.1 |
| 46 | 281.1 | 267.6 | 425 | 376.4 | 402.6 | 326.4 | 1021.7 | 863 |
| 47 | 739.5 | 340.9 | 354.1 | 543.9 | 308.4 | 485.9 | 555.9 | 1064.5 |
| 48 | 570.5 | 23 | 230 | 40.3 | 27.6 | 142.1 | 56.8 | 273.5 |
| 49 | 2690.8 | 7059.8 | 2365.9 | 162.5 | 247.7 | 3550.1 | 610.3 | 195.8 |
| 50 | 582.4 | 319.5 | 412.6 | 124.5 | 80 | 377.8 | 1255 | 230 |
| 51 | 530 | 1015.7 | 325.9 | 138.5 | 2289.9 | 333.2 | 623.9 | 65.3 |
| 52 | 333.7 | 327.9 | 286.2 | 281.6 | 329.4 | 221.1 | 347.5 | 493.3 |
| 53 | 3598.9 | 1864.6 | 1743.5 | 365.8 | 89.1 | 1567.9 | 1670 | 73.1 |
| 54 | 1988 | 1754.5 | 1175.5 | 286.1 | 91.4 | 1181.1 | 1478.9 | 2364.4 |
| 55 | 85.9 | 96.8 | 95.9 | 124.3 | 145 | 85.6 | 80 | 140.6 |
| 56 | 213.9 | 163.6 | 156.6 | 39 | 62.8 | 229.7 | 214.4 | 57.5 |
| 57 | 6568.1 | 82.1 | 618.1 | 951.4 | 256.7 | 1930 | 764.7 | 814 |
| 58 | 10305.1 | 843.3 | 1639.6 | 3341.1 | 274.3 | 2514.5 | 1398 | 1879.6 |
| 59 | 4632.7 | 8361.8 | 4125.6 | 1656.3 | 319.1 | 4755.6 | 2037.8 | 1675.3 |
| 60 | 510.1 | 221.7 | 136.9 | 117.4 | 148.1 | 354.9 | 336.7 | 187.1 |
| 61 | 98.3 | 111.4 | 123.3 | 179.6 | 275.5 | 108.5 | 72.9 | 74.6 |
| 62 | 5423.2 | 3854.1 | 2373.9 | 8567.7 | 2395.3 | 3812.3 | 2208.6 | 1481 |
| 63 | 830.4 | 1299.6 | 461.4 | 605.2 | 69.5 | 803.8 | 256.1 | 37.7 |
| 64 | 479.7 | 114.8 | 188.8 | 126.9 | 488.9 | 197.6 | 329.8 | 245.9 |
| 65 | 389.5 | 110.3 | 87.8 | 50.1 | 50.1 | 176 | 383.4 | 101.2 |
| 66 | 1831.2 | 3206.9 | 2835.9 | 601 | 634.9 | 2474.7 | 1318.9 | 103.3 |
| 67 | 26156.4 | 24869.8 | 31314 | 34527.1 | 10176.9 | 25736.9 | 1905.1 | 173.4 |
| 68 | 821.8 | 40.7 | 2360.3 | 789.4 | 2432.7 | 943.9 | 68.9 | 1.1 |
| 69 | 2579.5 | 781.6 | 1976.3 | 1894.3 | 5728.2 | 2305.4 | 397.5 | 111.3 |
| 70 | 5688.9 | 8491.7 | 8887.2 | 2267.9 | 5973.9 | 8571 | 4098.7 | 128.4 |
| 71 | 3496.6 | 5511.6 | 2751.2 | 100.6 | 65.6 | 3748.2 | 10193.5 | 626.2 |
| 72 | 3296 | 2026.7 | 1766.1 | 530.8 | 106.1 | 922 | 2699.1 | 99.9 |
| 73 | 763.6 | 839.9 | 660.7 | 520.4 | 264.6 | 888.6 | 359.2 | 419.4 |
| 75 | 4452.7 | 1125.7 | 275.2 | 310.3 | 145 | 804.4 | 156.6 | 359.9 |
| 76 | 2427.6 | 2043.5 | 940.2 | 329.2 | 2388.1 | 841.4 | 3184.4 | 22133.7 |
| 77 | 563.4 | 2247.6 | 3062.3 | 6825.9 | 2972.1 | 1722.2 | 280.8 | 2325.7 |
| 78 | 623.5 | 124.1 | 227.5 | 554.4 | 340.2 | 302.3 | 207.6 | 170.9 |
| 79 | 297.9 | 552.3 | 257.1 | 484.8 | 185.7 | 287.4 | 938.8 | 230.9 |
| 80 | 2294.3 | 1015.3 | 932.1 | 949.4 | 267.8 | 937.2 | 1004.6 | 2105.3 |
| 81 | 8681.4 | 6802.8 | 13448.3 | 318.1 | 159.4 | 16138.8 | 9121 | 168.3 |
| 82 | 128.2 | 99.7 | 135 | 270.9 | 561.7 | 187.3 | 146.7 | 52.5 |
| 84 | 308.9 | 120.8 | 130.3 | 138.1 | 893.7 | 256.5 | 336 | 131.7 |
| 85 | 410.7 | 2865.5 | 317.4 | 179.7 | 186.4 | 225.1 | 1173 | 198.2 |
| 86 | 71.5 | 641.8 | 296.9 | 391.1 | 257.7 | 123.2 | 2621.8 | 23448.8 |
| 87 | 689 | 3701.3 | 2676.7 | 616.5 | 261 | 857 | 2313.9 | 324 |
| 88 | 712.7 | 622.2 | 840 | 1105.6 | 1000.6 | 639.5 | 272.4 | 1569.4 |
| 89 | 295 | 186 | 158.6 | 179.6 | 961.8 | 277.3 | 453.9 | 155.9 |
| 90 | 215.5 | 68.7 | 167.8 | 107.4 | 122.9 | 164.7 | 1000.2 | 289 |
| 91 | 7519.7 | 924.8 | 1647.3 | 799.8 | 217.9 | 817.9 | 2001.9 | 2046.3 |
| 92 | 11830.9 | 13031.1 | 13383.8 | 7238.6 | 302.1 | 3811.1 | 5046.1 | 174.3 |
| 93 | 115.5 | 87.8 | 34 | 89.4 | 211.9 | 78.4 | 109.2 | 75.8 |
| 94 | 767.1 | 1362.1 | 410.1 | 191.2 | 97.7 | 553.9 | 380.2 | 39.9 |
| 95 | 299.5 | 345.9 | 216.6 | 55.5 | 193.5 | 512 | 708 | 62.4 |
| 96 | 353.2 | 438.1 | 419.9 | 460.6 | 210.2 | 326 | 144.2 | 304.2 |
| 97 | 808.2 | 693.9 | 524.2 | 2786.4 | 252.2 | 405.5 | 344.9 | 189.9 |
| 98 | 20.1 | 38.9 | 44.1 | 21.6 | 22.7 | 45.4 | 14.9 | 853 |
| 99 | 1151.9 | 1198.4 | 389.3 | 273.9 | 337.4 | 383.1 | 950.5 | 207.7 |
| 100 | 152.9 | 90.9 | 122.7 | 552.8 | 61.1 | 313.3 | 41.7 | 36022.7 |
| 101 | 260.8 | 135.8 | 150.6 | 140.2 | 234.4 | 326.1 | 275.4 | 121.1 |
| 102 | 117.3 | 164.9 | 193.6 | 214.6 | 452.9 | 190.4 | 161.9 | 15084.6 |
| 103 | 359.7 | 366.5 | 553.1 | 618.6 | 458.1 | 556.4 | 352.4 | 349.3 |
| 104 | 72.3 | 85.7 | 95.1 | 84.2 | 660.1 | 174.1 | 49.8 | 301.7 |
| 105 | 76.8 | 146 | 192.9 | 201.7 | 396.4 | 190.8 | 55 | 576.1 |
| 106 | 80.9 | 148.1 | 99.6 | 97.2 | 589.1 | 212.8 | 79.7 | 301 |
| 107 | 207.3 | 184.2 | 599.8 | 177.7 | 156.9 | 201.1 | 710.6 | 224.5 |
| 108 | 163.3 | 204.4 | 177.6 | 565.4 | 277.2 | 123.7 | 285.7 | 396 |
| 109 | 1770.9 | 611.2 | 2356.1 | 78.1 | 65.3 | 737.6 | 812.4 | 1225.9 |
| 110 | 3284.9 | 1445.7 | 5145.6 | 1.2 | 1.3 | 2012.1 | 2144.5 | 3019.9 |
| 111 | 125.1 | 46 | 62.7 | 29.8 | 254.8 | 274.1 | 161.3 | 39.9 |
| 112 | 616 | 1456.3 | 1415 | 289.8 | 56.8 | 1850.3 | 2408.5 | 94.2 |
| 113 | 484.5 | 533.3 | 277.4 | 98.1 | 241.5 | 317.7 | 339.8 | 66.4 |
| 114 | 600.1 | 371.3 | 562.4 | 290 | 103.7 | 987.5 | 502.2 | 156.9 |
| 115 | 1041.7 | 1742.3 | 1015.4 | 1023 | 384.6 | 1053.1 | 733.8 | 268.3 |
| 116 | 932 | 296 | 381 | 243.7 | 236.9 | 432.4 | 1273.7 | 147.7 |
| 117 | 339.7 | 124.5 | 167.1 | 263.6 | 190.4 | 177.4 | 107.7 | 55.5 |
| 118 | 69.7 | 220.3 | 177.8 | 130.5 | 3113.8 | 104.8 | 101.3 | 865.7 |
| 119 | 298.6 | 219.6 | 301.2 | 94.8 | 80.9 | 379.1 | 460.6 | 53 |
| 120 | 98.3 | 53.4 | 99.6 | 177.4 | 150.1 | 98.1 | 1050.9 | 126.1 |
| 121 | 5866 | 1900 | 3972.7 | 505.4 | 92.2 | 6630 | 207 | 2844.8 |
| 122 | 322.1 | 911.3 | 404.3 | 385.8 | 240.5 | 366.3 | 568.3 | 63.3 |
| 123 | 404.9 | 634.2 | 345.1 | 149 | 392 | 340.4 | 234.3 | 311.6 |
| 124 | 131.4 | 129.1 | 160.1 | 787.8 | 2835.4 | 130.4 | 121.4 | 150.7 |
| 125 | 723.6 | 926.1 | 1036 | 939.9 | 2182.9 | 947.8 | 12974.8 | 522.7 |
| 126 | 141.1 | 30.5 | 89 | 159 | 1503.2 | 35.6 | 3.1 | 355.9 |
| 127 | 191.9 | 184.3 | 258.1 | 319.5 | 139.6 | 201.4 | 155.4 | 104.9 |
| 128 | 179 | 235943.8 | 208.7 | 264 | 359.9 | 236127.3 | 90211.9 | 230929.7 |
| 129 | 1267.5 | 3432.6 | 1214.7 | 246.9 | 149.3 | 1110.6 | 5445.8 | 153.6 |
| 130 | 540.5 | 632.3 | 587.9 | 375.8 | 113.6 | 347.2 | 1074.4 | 82.4 |
| 131 | 856.8 | 607.9 | 246.2 | 90.3 | 123.9 | 357 | 480 | 54.8 |
| 132 | 387.6 | 420.8 | 334.4 | 228.4 | 227.3 | 360.2 | 314.6 | 225.9 |
| 133 | 237.3 | 363.1 | 302.2 | 130.6 | 230.6 | 311.5 | 218 | 603.9 |
| 134 | 594.4 | 1140 | 498.1 | 384 | 104 | 345.6 | 401.6 | 224.8 |
| 135 | 1075.3 | 533.8 | 887.3 | 1588.4 | 220 | 677.5 | 175.4 | 301.4 |
| 138 | 231.7 | 110.1 | 175.8 | 232.6 | 169.6 | 171 | 141.3 | 203.3 |
| 139 | 298.9 | 162.7 | 156.5 | 459.8 | 119.7 | 182.1 | 162 | 227.8 |
| 140 | 762.9 | 725.5 | 154.5 | 31.8 | 1.2 | 92.1 | 35.4 | 1.1 |
| 141 | 621.6 | 930.7 | 688.4 | 687.8 | 23 | 420.1 | 36.5 | 666.8 |
| 144 | 37803 | 9899.9 | 22316.3 | 645.5 | 490.7 | 13084 | 9054.7 | 316.7 |
| 145 | 177 | 368.3 | 269.9 | 232.7 | 310.9 | 289.2 | 250 | 219.2 |
| 146 | 243 | 250.9 | 892.8 | 185.8 | 329 | 1096 | 513.5 | 231 |
| 147 | 120.4 | 64.3 | 79.7 | 78.1 | 34.2 | 140.2 | 94 | 23.6 |
| 148 | 677.9 | 631.3 | 630.4 | 298.9 | 225.4 | 335.1 | 307.8 | 192.7 |
| 149 | 398.6 | 217.3 | 602.8 | 1656.9 | 31.3 | 377.5 | 134 | 54.5 |
| 150 | 374.1 | 454.4 | 196.3 | 972.4 | 157.6 | 149.2 | 283.3 | 5740.8 |
| 151 | 1052 | 1195 | 656.8 | 163.7 | 191.8 | 924.2 | 636.7 | 216.6 |
| 153 | 139.4 | 146.7 | 146.2 | 319.5 | 194.7 | 88.4 | 724.1 | 99.2 |
| 154 | 8645.2 | 16591.3 | 5176.3 | 424.8 | 109.1 | 3577 | 4066.1 | 75.6 |
| 155 | 246.6 | 937.6 | 813.8 | 187.8 | 175.2 | 624.4 | 381.4 | 146.7 |
| 156 | 295.3 | 187.6 | 212 | 76.1 | 53.7 | 543.4 | 250.4 | 52.4 |
| 157 | 223.9 | 203.1 | 318.4 | 199.3 | 184.1 | 199.3 | 122.6 | 224.2 |
| 158 | 537.6 | 821.6 | 265.2 | 1.4 | 27 | 713.1 | 498.5 | 9.4 |
| 159 | 1344.7 | 1973.3 | 1599.7 | 3234 | 904.2 | 1579.4 | 405.5 | 1.3 |
| 161 | 3301.2 | 7782.7 | 14054.5 | 63.2 | 66.7 | 8990.6 | 4295.2 | 228.4 |
| 162 | 701.6 | 131.2 | 171.7 | 65.8 | 32 | 330.5 | 1161.7 | 70.7 |
| 164 | 8016.9 | 3022.2 | 1600.5 | 253.8 | 89.7 | 771.6 | 851.6 | 88.2 |
| 166 | 1326.9 | 1067.9 | 409.9 | 3604 | 3611.9 | 1114.7 | 1254.5 | 258.6 |
| 167 | 457.9 | 95.7 | 482.2 | 1592.1 | 1309.9 | 959.2 | 81.5 | 1.2 |
| 168 | 1090.3 | 935.1 | 1205.2 | 793.6 | 90.8 | 552 | 89.1 | 34.2 |
| 169 | 13698.9 | 8961.4 | 4979.8 | 1588.3 | 221.9 | 15295.7 | 6424.9 | 919.2 |
| 170 | 2889.3 | 2125.1 | 1875.6 | 2018.5 | 38 | 2738.1 | 2166.4 | 1941.3 |
| 171 | 575.6 | 86.9 | 234.3 | 1.3 | 1.2 | 326.8 | 1162.6 | 272.5 |
| 172 | 480.7 | 479.3 | 537.5 | 625.7 | 696.9 | 476.9 | 451.9 | 506.7 |
| 173 | 1793.3 | 647.9 | 338.5 | 142.8 | 256.6 | 1057.8 | 862.7 | 492.4 |
| 176 | 1468.4 | 1365.5 | 272.9 | 1.2 | 75.3 | 744.9 | 117.3 | 10085.2 |
| 177 | 275.1 | 98.7 | 141 | 183.5 | 592.4 | 278.4 | 235.9 | 131.1 |
| 178 | 1912.6 | 1129.2 | 203.6 | 86.2 | 728 | 1472.4 | 2389 | 12289 |
| 179 | 485.6 | 1376.2 | 243.4 | 60 | 153.3 | 1065.3 | 3098.7 | 53.9 |
| 180 | 1011.7 | 464.5 | 526.5 | 263.1 | 154.4 | 957.8 | 1085 | 118.1 |
| 181 | 5130.4 | 3292.8 | 3724 | 13102.1 | 11246.2 | 5277.8 | 2419.3 | 389.1 |
| 182 | 530.4 | 324.9 | 404 | 767.8 | 204.4 | 388.4 | 384.7 | 169.2 |
| 183 | 447.6 | 199 | 135.7 | 1.1 | 1.1 | 259.9 | 1258.2 | 281.4 |
| 184 | 620 | 357.8 | 340.4 | 291.6 | 192 | 428.8 | 14293.9 | 682.8 |
| 185 | 3627.9 | 10011.6 | 2963.4 | 729 | 355.6 | 10614.7 | 3033.4 | 880 |
| 186 | 173.9 | 184.8 | 258.3 | 1106 | 716.2 | 173.4 | 287.8 | 2619 |
| 187 | 333.3 | 525.2 | 136.5 | 200.2 | 239.2 | 314.3 | 689.4 | 176.4 |
| 188 | 435.3 | 350.4 | 378.3 | 132.3 | 145.2 | 161.9 | 1419.6 | 133.9 |
| 189 | 181.3 | 130.5 | 201.3 | 91.3 | 144.2 | 92.7 | 674.1 | 79.5 |
| 190 | 359.9 | 238.5 | 312 | 108.8 | 110.1 | 485.5 | 163.7 | 58.4 |
| 191 | 5707 | 3740.1 | 3029.6 | 3256.5 | 886.2 | 2447.8 | 3778.5 | 97.4 |
| 192 | 150.4 | 95.8 | 139.2 | 130.9 | 129.3 | 109.1 | 506.3 | 2753.6 |
| 193 | 361.7 | 114.3 | 88.9 | 6063.3 | 105.9 | 289.6 | 160.1 | 46.2 |
| 194 | 261.5 | 249.3 | 203.6 | 200.9 | 134.1 | 251.6 | 372.2 | 471.3 |
| 195 | 132 | 110.9 | 158.3 | 96.7 | 440.4 | 150 | 189.2 | 297.3 |
| 196 | 1327.6 | 1039.5 | 1104 | 311.8 | 7746.9 | 3084.9 | 1670.6 | 448.2 |
| 197 | 132.2 | 98.3 | 139.2 | 194 | 218.3 | 141.3 | 868.5 | 520.5 |
| 198 | 532.6 | 1476.5 | 1624.7 | 83.8 | 94.6 | 2377.6 | 755.4 | 70.4 |
| 199 | 7184.6 | 2171.3 | 7934.6 | 482.3 | 52.5 | 4537.3 | 5623.9 | 4564.9 |
| 200 | 975.6 | 370.7 | 300.2 | 182.2 | 210.4 | 482.6 | 427.5 | 1652.6 |
| 201 | 957 | 604.8 | 467.3 | 35.1 | 11.1 | 420.7 | 334 | 1094.3 |
| 203 | 3711.3 | 1570.8 | 1229.6 | 5308.7 | 248.9 | 965.6 | 1358.9 | 47.1 |
| 204 | 1750.8 | 1898.9 | 2112.9 | 4011.7 | 204.1 | 1174.1 | 290.9 | 27.1 |
| 205 | 6039 | 4435.4 | 3880.5 | 6493.9 | 2337.3 | 4612.6 | 1166.9 | 3.2 |
| 206 | 163.8 | 374.4 | 608.3 | 472.7 | 308.5 | 390.5 | 250 | 327.8 |
| 207 | 480.6 | 47.7 | 74.7 | 206.6 | 34.9 | 103.4 | 58.1 | 59.8 |
| 208 | 585.4 | 1688.4 | 1780.1 | 191.9 | 58.9 | 866.4 | 278.1 | 1.6 |
| 209 | 197.5 | 4.4 | 60.6 | 353.2 | 5030.7 | 400.5 | 66.4 | 207.9 |
| 211 | 1550.5 | 219.1 | 1271.8 | 1356.7 | 942.5 | 164.7 | 120.1 | 87.4 |
| 212 | 1426 | 1312.8 | 870.1 | 225.4 | 1412.1 | 2035.3 | 1106.7 | 52.1 |
| 213 | 104 | 191.1 | 118.8 | 124.5 | 3087.3 | 123.3 | 121.9 | 77.7 |
| 215 | 475.1 | 55.9 | 84.6 | 15 | 9 | 131.4 | 77.7 | 93 |
| 216 | 397.6 | 259.8 | 310.5 | 423.2 | 377.9 | 179.3 | 226.1 | 222.2 |
| 217 | 1130.5 | 517.6 | 725 | 187.5 | 173.5 | 2109.1 | 1336.7 | 189.2 |
| 218 | 159.4 | 224.9 | 205.2 | 353.5 | 294.1 | 236.6 | 199.5 | 89 |
| 220 | 79.6 | 70 | 204.6 | 1293.4 | 119 | 128.5 | 270.9 | 68484.3 |
| 221 | 2459.4 | 1795.5 | 739.3 | 429.3 | 254.4 | 1453.4 | 860.5 | 219.7 |
| 223 | 981.9 | 680.4 | 687.3 | 439.1 | 267.8 | 500.2 | 459.3 | 290.4 |
| 227 | 1489.9 | 1104.5 | 879.4 | 1033.7 | 822.7 | 1224.7 | 5386.3 | 435.5 |
| 228 | 186.1 | 178.2 | 271.2 | 198.1 | 433.9 | 318.4 | 220.6 | 177.1 |
| 229 | 180.5 | 334 | 201.9 | 302.5 | 172.6 | 189.2 | 253.5 | 582.6 |
| 230 | 3245.4 | 2835.9 | 3394.8 | 163.3 | 99.6 | 3274.1 | 4388 | 147.1 |
| 231 | 1258.8 | 702.6 | 436 | 985.6 | 204.9 | 418.8 | 591.9 | 75.2 |
| 232 | 704.3 | 266.5 | 271.6 | 59.5 | 31.8 | 1000 | 4104.9 | 782 |
| 233 | 15997.8 | 9251.8 | 21829 | 5239.6 | 15022 | 18292.9 | 3490 | 3738.3 |
| 235 | 405.2 | 135 | 205.3 | 218.8 | 77.9 | 242.7 | 688.4 | 216.2 |
| 236 | 345.4 | 176.8 | 244.3 | 51.8 | 289.1 | 251.1 | 569.9 | 355.3 |
| 237 | 2087.1 | 2074.2 | 977.3 | 667.1 | 647.6 | 2376.1 | 1252 | 2105 |
| 238 | 1029.7 | 709.6 | 957.5 | 1263.7 | 456.5 | 1002.9 | 733.2 | 417.9 |
| 239 | 398.5 | 111.4 | 252.1 | 162.3 | 97.3 | 806.1 | 929.5 | 1253.4 |
| 240 | 590.8 | 219.9 | 517.4 | 355.8 | 74.6 | 973.1 | 1561.1 | 1235 |
| 241 | 1224.2 | 353.4 | 781.2 | 558.8 | 62.3 | 2210.8 | 2833.8 | 2772.1 |
| 242 | 31599.6 | 34700.3 | 41193.8 | 1998.1 | 39786.8 | 38117 | 29127.6 | 4032.5 |
| 243 | 496 | 1167.3 | 574.5 | 293.2 | 363.2 | 674.9 | 937.7 | 478.8 |
| 244 | 619.3 | 993.1 | 600.4 | 303.2 | 63.1 | 271.1 | 782.3 | 352.7 |
| 246 | 1856.6 | 1243.2 | 1238.1 | 641.8 | 111.2 | 2226.5 | 1235.4 | 797.6 |
| 247 | 90.8 | 89.3 | 158.9 | 200.2 | 539.1 | 130.5 | 88.4 | 2091.6 |
| 248 | 3748.4 | 2617 | 1198.3 | 214.5 | 80.7 | 1744 | 935.6 | 108.1 |
| 249 | 2042.6 | 468.9 | 513.5 | 50.4 | 326.4 | 336.8 | 254.7 | 971.7 |
| 251 | 595 | 1004.5 | 592 | 56.1 | 35 | 1047.9 | 2445.5 | 71.5 |
| 253 | 465.8 | 497.1 | 469.6 | 410 | 220.1 | 449.3 | 295.9 | 531.1 |
| 254 | 2043.5 | 910.3 | 939.7 | 363.4 | 86 | 1038.8 | 861.8 | 107 |
| 255 | 2304.8 | 1354.8 | 344.7 | 122.3 | 762.2 | 1679.9 | 2631.1 | 14516.5 |
| 256 | 7209.5 | 1050.3 | 1841.6 | 927.6 | 282.3 | 701.3 | 1193.8 | 1494.3 |
| 257 | 856.2 | 248.4 | 216.9 | 662.9 | 150 | 341.6 | 378.8 | 234.1 |
| 258 | 1862.6 | 2711.5 | 2864.4 | 273.4 | 23.2 | 1388.3 | 3786.6 | 38.9 |
| 259 | 690.8 | 1255 | 315.5 | 8.9 | 8.9 | 666.1 | 567.4 | 35.6 |
| 260 | 171.5 | 136.4 | 233.1 | 141.7 | 251.1 | 174 | 130.8 | 576.4 |
| 261 | 647.4 | 192.8 | 70.8 | 118.2 | 87.7 | 108 | 72.5 | 91.1 |
| 263 | 797.9 | 1445.4 | 889.1 | 1265 | 3327 | 572.6 | 1048.4 | 4844.5 |
| 263 | 2900.5 | 3388 | 4354 | 382 | 258.7 | 2740.8 | 3471.4 | 176.5 |
| 265 | 89.2 | 115.6 | 179.2 | 394.1 | 219 | 100.9 | 131.6 | 85.6 |
| 266 | 213.6 | 237.5 | 772.5 | 877 | 652.8 | 477.8 | 159.6 | 124 |
| 256 | 293.8 | 159.8 | 170.3 | 96.7 | 137.6 | 266.6 | 612.1 | 111.9 |
| 268 | 427.2 | 47.3 | 133.1 | 64.4 | 531.8 | 497.3 | 80.3 | 18.9 |
| 269 | 144.1 | 171.6 | 184 | 64.4 | 137.5 | 256.6 | 159.2 | 47.1 |
| 270 | 149.1 | 221.6 | 249.7 | 540.1 | 727.4 | 204.9 | 126.7 | 413 |
| 271 | 928.9 | 1477.3 | 659.3 | 228.8 | 157 | 361 | 939.9 | 257.9 |
| 272 | 2065.5 | 769.5 | 961.5 | 709.2 | 889.7 | 644.3 | 583.3 | 1336.4 |
| 273 | 460 | 254.4 | 1932.6 | 1972 | 55.7 | 1557.3 | 1.2 | 1.1 |
| 274 | 1272 | 1303.2 | 959.1 | 381.8 | 692.6 | 817.7 | 3288.6 | 1936.2 |
| 275 | 1067.2 | 3809.3 | 819 | 189.7 | 89.6 | 3279.9 | 984.3 | 183.6 |
| 276 | 1560.5 | 1665.4 | 856.1 | 437.3 | 864.3 | 1770.9 | 8639.5 | 830.5 |
| 277 | 420.2 | 373.4 | 347.1 | 255.6 | 230.4 | 352.6 | 225.8 | 197.8 |
| 278 | 1479.6 | 2479.2 | 413.9 | 38.1 | 16.1 | 1327.7 | 1485.3 | 1104.2 |
| 279 | 4418.5 | 1252.4 | 1647.9 | 1229.2 | 826.2 | 1907.3 | 690.5 | 1.2 |
| 280 | 6980.6 | 3103.2 | 5603.5 | 9202.3 | 973.7 | 3117.3 | 1054 | 1.4 |
| 281 | 893.5 | 469.5 | 390.8 | 50.9 | 76.1 | 645.6 | 28.3 | 2949.8 |
| 282 | 436.5 | 866.2 | 712.4 | 604.9 | 432.1 | 429.3 | 4533.3 | 239.2 |
| 283 | 378.5 | 494.1 | 618.3 | 438.7 | 610.6 | 397.3 | 345.7 | 2247.9 |
| 284 | 86.5 | 78.4 | 84.7 | 59.9 | 151.4 | 121.6 | 104 | 90 |
| 285 | 100.1 | 125 | 140.6 | 171.6 | 130.3 | 107.2 | 95.4 | 109.5 |
| 286 | 21.9 | 47 | 34.4 | 361.5 | 622.2 | 17.4 | 51 | 14.1 |
| 287 | 85 | 103.5 | 147.3 | 266.3 | 140.8 | 110.4 | 90.8 | 52593.6 |
| 288 | 106.7 | 108.9 | 226 | 255.8 | 302 | 141.1 | 141.3 | 161.5 |
| 289 | 16536.4 | 1225.1 | 3454 | 1845.6 | 187.6 | 1317.1 | 1594.5 | 336.7 |
| 291 | 197.9 | 131.8 | 167.2 | 170.5 | 27.6 | 264.2 | 372 | 222.7 |
| 292 | 10808.4 | 363.8 | 202.4 | 174.8 | 66 | 1720 | 15444.1 | 227.7 |
| 293 | 409.1 | 361.7 | 288.2 | 206.3 | 82.6 | 711.2 | 306.9 | 55.7 |
| 295 | 812 | 283.8 | 1193.9 | 554.6 | 477.9 | 2370 | 701.1 | 344.9 |
| 296 | 2134.1 | 3003.7 | 1806.5 | 1160.2 | 1121 | 1902.2 | 1362.4 | 253.2 |
| 297 | 38.5 | 59.7 | 102.3 | 75.6 | 2740.8 | 70.7 | 113.3 | 39.2 |
| 298 | 610.2 | 990 | 998 | 952 | 469.4 | 525.7 | 390.2 | 600.9 |
| 299 | 2108.9 | 4536.4 | 3222.2 | 2152.4 | 419.3 | 4258 | 1379.7 | 77.2 |
| 300 | 1679.8 | 1409.5 | 1107.2 | 90.1 | 244.2 | 1361.8 | 952.6 | 239.4 |
| 301 | 221.2 | 271 | 284.8 | 845.7 | 261 | 211.4 | 223.5 | 162.3 |
| 302 | 216.8 | 246.1 | 174.8 | 34.5 | 40.3 | 171.5 | 310.6 | 21.7 |
| 303 | 266.3 | 414.9 | 259.1 | 1838.2 | 984.5 | 263.8 | 215.7 | 52.1 |
| 304 | 1007.4 | 636.1 | 791.1 | 1190.1 | 791 | 396.5 | 803.9 | 2631.2 |
| 305 | 2780.8 | 1913 | 203.5 | 627.5 | 451.4 | 213.2 | 4287.8 | 28703.6 |
| 306 | 600.9 | 1369.7 | 510.6 | 266.5 | 278.1 | 451.2 | 469.4 | 196.1 |
| 307 | 427.2 | 183.4 | 239.2 | 150 | 194.3 | 189.6 | 485.2 | 145.3 |
| 308 | 296.6 | 711.6 | 941.5 | 559.6 | 3583.4 | 734 | 515.2 | 1057.1 |
| 310 | 71.1 | 164.3 | 307 | 1005.9 | 1091.8 | 92.5 | 194.1 | 204.9 |
| 311 | 819.5 | 309.6 | 177.4 | 119.9 | 48.5 | 805.6 | 148.5 | 343.4 |
| 312 | 35.7 | 488.7 | 553.3 | 5485.3 | 1957.5 | 229.2 | 282.3 | 1084.7 |
| 313 | 624.7 | 219.7 | 192.2 | 247.3 | 117.1 | 393.7 | 632.5 | 548.7 |
| 314 | 1060.4 | 958.7 | 775.5 | 190.2 | 164.3 | 1171 | 521.3 | 302.7 |
| 315 | 208.4 | 52.1 | 72 | 131.8 | 117.4 | 149.4 | 73.1 | 78.3 |
| 316 | 967.1 | 497.3 | 525.1 | 285.3 | 123.4 | 509.3 | 313.1 | 1093.3 |
| 317 | 1983.8 | 165 | 184.2 | 186.9 | 201.3 | 230.5 | 235.8 | 160.7 |
| 318 | 535.8 | 1159.4 | 335.7 | 57.8 | 34.2 | 275.6 | 327.6 | 202.1 |
| 319 | 303 | 615.9 | 648.6 | 565.7 | 660.6 | 420.7 | 486.2 | 82.1 |
| 320 | 250.3 | 171.3 | 229.3 | 898.4 | 581.8 | 283.3 | 182.8 | 91.2 |
| 321 | 153.9 | 170.4 | 222.1 | 487.3 | 395.4 | 195.2 | 275.7 | 152.1 |
| 322 | 272.1 | 366 | 269.8 | 234.9 | 505.1 | 327 | 291.7 | 323.8 |
| 323 | 4149 | 2529.2 | 4790.2 | 11767.2 | 291.7 | 2101.2 | 1031.5 | 36.9 |
| 324 | 597.9 | 1026.6 | 425.6 | 216.6 | 66.4 | 520.2 | 374.4 | 38.3 |
| 325 | 600.8 | 475.6 | 489.7 | 427.7 | 333.3 | 614.4 | 461.4 | 102.3 |
| 326 | 6135.2 | 4645.8 | 2435.9 | 4623.7 | 489.7 | 3385.8 | 361.8 | 54.9 |
| 327 | 137 | 39.2 | 140.2 | 11.6 | 18.1 | 772 | 1166.8 | 47 |
| 328 | 139.5 | 41.9 | 42 | 35.3 | 115.4 | 264.6 | 82.5 | 28.1 |
| 329 | 45.1 | 69.1 | 52.6 | 106.4 | 190.4 | 59.3 | 53.4 | 158.6 |
| 330 | 1850.5 | 187.5 | 197.4 | 57.5 | 63.1 | 611.9 | 92.7 | 48.8 |
| 331 | 306.7 | 290.7 | 381.2 | 458.9 | 680.9 | 301.1 | 355.5 | 305.4 |
| 333 | 168.8 | 202.7 | 113.7 | 654.4 | 440.1 | 99.6 | 101.7 | 733.2 |
| 334 | 157.4 | 151.2 | 147.9 | 185.5 | 154.5 | 491.6 | 227.7 | 175.6 |
| 335 | 355 | 141.1 | 215.2 | 128.2 | 621.4 | 273.8 | 122.1 | 95.7 |
| 336 | 199.6 | 235 | 357 | 392.5 | 544.7 | 194.9 | 201.4 | 419.4 |
| 337 | 529.5 | 776.2 | 670.2 | 5029.2 | 12.6 | 247.4 | 1259.7 | 37.2 |
| 338 | 2393.6 | 467.5 | 1714.9 | 222.6 | 93.8 | 1228.2 | 573.6 | 80.8 |
| 339 | 268.9 | 201 | 224.4 | 249 | 562.8 | 317.5 | 248.1 | 316.4 |
| 340 | 108216.2 | 107282.5 | 151414.7 | 284.8 | 351.6 | 104374 | 125245.9 | 415.7 |
| 341 | 557.6 | 400 | 640.4 | 937.5 | 796.5 | 538.1 | 314.8 | 530.6 |
| 343 | 4739.2 | 4407 | 2670 | 1153.2 | 3880.9 | 3677.6 | 847.9 | 199.5 |
| 344 | 535.4 | 284.2 | 615.6 | 2191.3 | 1660.9 | 465.9 | 413.9 | 155.3 |
| 345 | 437.9 | 418.5 | 469.5 | 233.5 | 318 | 503.8 | 379.4 | 297.9 |
| 347 | 2204.6 | 607.2 | 2427.6 | 366.1 | 1391.9 | 1925.4 | 461.5 | 76.1 |
| 348 | 7719.8 | 2494 | 5392.3 | 378.6 | 2314.6 | 5267.1 | 1183.1 | 125.8 |
| 349 | 570.2 | 609 | 636 | 458.1 | 172.2 | 320.7 | 665.1 | 493.5 |
| 350 | 497.3 | 566.4 | 585.7 | 901.1 | 105.7 | 491.3 | 539.6 | 37.9 |
| 351 | 1925.2 | 1358.6 | 1065.7 | 133.7 | 96.1 | 1962.8 | 717.3 | 32.9 |
| 352 | 177.5 | 197.1 | 290.5 | 1585.5 | 569.8 | 165.4 | 101.5 | 302.3 |
| 353 | 734.5 | 602 | 399.5 | 357.6 | 924 | 415.5 | 202.7 | 175.3 |

3g

| SEQ ID NO: | 902TT | 903TT | 904TT | 907TT | 908TT | 909TT | 910TT | 913TT |
|---|---|---|---|---|---|---|---|---|
| 354 | 1260.9 | 3539.8 | 3818.1 | 9.2 | 180.3 | 221.3 | 64.7 | 837.9 |
| 355 | 83.5 | 5857.1 | 8246.9 | 48.4 | 247 | 60.3 | 53.8 | 151.4 |
| 356 | 105.3 | 500.4 | 419.6 | 781.6 | 797.8 | 102.4 | 278.5 | 575.7 |
| 357 | 249.4 | 689.9 | 517.8 | 798.6 | 569.9 | 361.7 | 600.7 | 655.3 |
| 358 | 975.3 | 2387.6 | 1281.2 | 823.5 | 857.3 | 1419.9 | 874.2 | 849.4 |
| 359 | 419.6 | 370.8 | 337.1 | 471.8 | 328.4 | 383.9 | 347.2 | 356.6 |
| 362 | 373.2 | 1448.2 | 359.4 | 401 | 473.1 | 781.6 | 303.4 | 262.5 |
| 360 | 268 | 446.7 | 558.4 | 242 | 366.4 | 1651.7 | 276.5 | 241.5 |
| 361 | 172.3 | 318.3 | 567.6 | 1196.1 | 670.7 | 316.5 | 236.7 | 426.2 |
| 363 | 1097.1 | 422.7 | 450.5 | 468.3 | 468.2 | 570.7 | 425.1 | 561.6 |
| 1 | 242.7 | 1509.1 | 565.3 | 1975.2 | 843.7 | 742.5 | 644.2 | 516.1 |
| 2 | 425.6 | 4753.1 | 2426.5 | 2640.2 | 3242 | 1866.5 | 1738.3 | 2465.6 |
| 7 | 96.7 | 1020.9 | 322.7 | 1442.2 | 913.4 | 2.1 | 688.8 | 390.1 |
| 8 | 1309.4 | 1177 | 1828.8 | 572.9 | 1092.8 | 1041.7 | 904 | 1781.9 |
| 9 | 496.7 | 2818.2 | 4872.6 | 1566 | 6508.7 | 2940.7 | 542 | 8678 |
| 10 | 150.7 | 81.4 | 218 | 97.4 | 90.5 | 118.5 | 139 | 57.6 |
| 11 | 623.6 | 578.7 | 535.7 | 283.7 | 341.2 | 219.9 | 168.8 | 310 |
| 13 | 173.4 | 526.7 | 1528.1 | 95.2 | 286 | 227.3 | 1018.4 | 322 |
| 14 | 424.5 | 1784.7 | 2754 | 255.4 | 584.8 | 1148.7 | 2517.6 | 721.5 |
| 15 | 192.6 | 231.1 | 6970.4 | 559.7 | 866.8 | 2354.9 | 135.8 | 2247.9 |
| 16 | 814.4 | 2337.1 | 1020.3 | 571 | 1207.1 | 216.6 | 1179.9 | 947 |
| 17 | 417 | 1095.8 | 1202.6 | 1279.3 | 1125.9 | 1162.1 | 297.9 | 1237.4 |
| 19 | 320.6 | 619.6 | 2250.9 | 274.2 | 4651.6 | 16678.5 | 159.1 | 586.3 |
| 20 | 41.5 | 263.6 | 1643.5 | 94.1 | 70.4 | 35.5 | 1.3 | 42.3 |
| 21 | 128 | 2017.2 | 451.4 | 191.3 | 326.9 | 52.2 | 97.2 | 172.4 |
| 22 | 2089.5 | 4271.9 | 6617.2 | 4571.3 | 6361.4 | 2003.9 | 1809.4 | 7708.1 |
| 23 | 1.1 | 427.6 | 5067.6 | 455.9 | 966.7 | 2190.6 | 113.7 | 2551.2 |
| 24 | 140.7 | 218.4 | 963.7 | 245.9 | 328.3 | 456.7 | 114.4 | 572.7 |
| 26 | 110.4 | 1938 | 14240.4 | 1024 | 7609.6 | 17839.9 | 409.3 | 5874.4 |
| 27 | 736 | 1194.6 | 387.1 | 374.1 | 866.3 | 660.5 | 336.8 | 622.3 |
| 29 | 1746.3 | 207.1 | 150.7 | 96.2 | 129.5 | 375.2 | 87.3 | 132.6 |
| 30 | 60.4 | 204.1 | 7348.8 | 247 | 268.9 | 1830.2 | 51.2 | 900.4 |
| 31 | 250.5 | 4640.9 | 1272.4 | 54.2 | 361.6 | 246.2 | 125.6 | 11511.9 |
| 33 | 726.1 | 1138.2 | 22827.9 | 1763 | 1784.5 | 2090.6 | 172.6 | 8499.2 |
| 34 | 1224.5 | 1241.4 | 1284.7 | 2615.8 | 4040.9 | 1589 | 2170.1 | 3921.1 |
| 35 | 265.2 | 1740 | 1410.3 | 169.9 | 408.1 | 178.3 | 49.7 | 274.5 |
| 36 | 306.6 | 2846 | 753.6 | 141.1 | 241.3 | 516.5 | 112.2 | 307.4 |
| 37 | 441.8 | 182.5 | 666.4 | 164.8 | 262.4 | 355.8 | 217.6 | 253.3 |
| 38 | 390.4 | 378.8 | 13610.5 | 1317 | 946.6 | 761.7 | 296.8 | 5444.7 |
| 40 | 678 | 819.1 | 540.9 | 3014.7 | 512.9 | 629.2 | 400 | 556.2 |
| 41 | 644.1 | 499.6 | 729.1 | 155 | 425.8 | 379.6 | 508.2 | 453.1 |
| 42 | 291 | 418.9 | 301 | 279.7 | 205.7 | 234 | 453.1 | 140.6 |
| 43 | 2139.6 | 206.7 | 327.3 | 675.6 | 397 | 893.4 | 362.6 | 369.2 |
| 44 | 737 | 1115 | 1144.4 | 735.2 | 636.8 | 1352.5 | 377.3 | 421.9 |
| 45 | 1766.4 | 1105.2 | 390.4 | 587.3 | 440.9 | 35.5 | 1234.1 | 598.6 |
| 46 | 871.9 | 344.7 | 382.8 | 237.1 | 318 | 362.4 | 260.5 | 359.7 |
| 47 | 157.7 | 796 | 425.9 | 228.6 | 277.4 | 458.4 | 103.4 | 356.2 |
| 48 | 100.3 | 309.2 | 2616.3 | 124.4 | 634.6 | 1634.5 | 65.7 | 281.8 |
| 49 | 270.1 | 6992.3 | 2626.6 | 317.7 | 377.3 | 697.2 | 177.2 | 387.6 |
| 50 | 165.6 | 199.9 | 3637.3 | 652.6 | 305.4 | 478.1 | 71.2 | 1362.6 |
| 51 | 678.9 | 706.6 | 252.1 | 581.3 | 55.1 | 329.7 | 103.8 | 97.2 |
| 52 | 336 | 238.2 | 225.3 | 231.8 | 202.9 | 192.7 | 152.9 | 196.9 |
| 53 | 318.6 | 1664.1 | 277 | 119.1 | 102.4 | 73.8 | 168.1 | 127.6 |
| 54 | 230.9 | 1387 | 467.5 | 296.1 | 274.5 | 242.3 | 1255.6 | 479.9 |
| 55 | 100.5 | 82.4 | 82.1 | 91.1 | 106 | 121.4 | 99.6 | 99.4 |
| 56 | 18.8 | 321.8 | 83.3 | 126.2 | 51 | 49.7 | 267 | 79.7 |
| 57 | 2055.1 | 6894.7 | 1056.4 | 181 | 1040.6 | 898.5 | 320.9 | 6449.5 |
| 58 | 3611 | 7181.8 | 1246 | 192.6 | 956.8 | 1419.1 | 257.5 | 8484.9 |
| 59 | 652.5 | 2674.1 | 1061 | 813.9 | 1612.9 | 824.9 | 505.6 | 837.7 |
| 60 | 153.4 | 426.9 | 592.3 | 113.9 | 288.1 | 186.2 | 123.5 | 328.9 |
| 61 | 248.3 | 108 | 110.1 | 157.8 | 116.1 | 86.1 | 104.3 | 147.4 |
| 62 | 892.6 | 4240.6 | 2145.8 | 4532 | 1616.2 | 180.2 | 167.4 | 1671.5 |
| 63 | 43.1 | 696.1 | 228.6 | 152.7 | 248 | 203.2 | 222.5 | 1249.7 |
| 64 | 754.3 | 484.8 | 96.8 | 136.8 | 172.4 | 8787.9 | 99.3 | 336.8 |
| 65 | 83.2 | 218.3 | 730.9 | 106.4 | 207.9 | 403.2 | 75.9 | 215.4 |
| 66 | 493.5 | 1210 | 670.5 | 495.6 | 581.9 | 1176.5 | 951.4 | 686.8 |
| 67 | 10133.8 | 33324.8 | 24242 | 34583.3 | 33362.6 | 3068.3 | 31350 | 37066.4 |
| 68 | 2389.5 | 1201.4 | 1568 | 9401.9 | 2614.5 | 46.9 | 4918.3 | 1993.1 |
| 69 | 6293.3 | 2834.3 | 3650.8 | 13600.4 | 4671 | 198 | 6730.8 | 2110.2 |
| 70 | 7326.8 | 5218.4 | 1465.6 | 2301.9 | 1698 | 1562.6 | 3047.7 | 1292.1 |
| 71 | 109.3 | 5006.6 | 1167.7 | 193.9 | 743.9 | 3907.9 | 456.8 | 458.4 |
| 72 | 207.7 | 2313.9 | 1722.7 | 291.3 | 396.6 | 781 | 109 | 349.6 |
| 73 | 194.2 | 657.8 | 526.2 | 409.4 | 339.5 | 863 | 203.3 | 363.5 |
| 75 | 76.6 | 1227.8 | 331.8 | 313 | 290.4 | 824.9 | 86.8 | 175.5 |
| 76 | 2053.9 | 1453.3 | 198.2 | 1.4 | 166 | 90.4 | 4285.2 | 181.1 |
| 77 | 1780 | 1586 | 1427 | 6365.7 | 5262.6 | 227.6 | 2010.2 | 3182.5 |
| 78 | 481.4 | 317.2 | 437.6 | 789.5 | 715.2 | 564.6 | 535.8 | 202.4 |
| 79 | 461.6 | 214.6 | 214.2 | 96.5 | 110.5 | 1271 | 235.9 | 128.6 |
| 80 | 121.1 | 746.1 | 294 | 272.1 | 130.4 | 80.8 | 247.6 | 349.5 |
| 81 | 125.1 | 6473 | 2165.1 | 112.4 | 380.6 | 161.3 | 327.9 | 257.7 |
| 82 | 704.3 | 216.5 | 171 | 431.3 | 318.7 | 149.5 | 340 | 308.5 |
| 84 | 221.9 | 611.2 | 399.9 | 105.1 | 228.8 | 2138.2 | 106 | 204.7 |
| 85 | 269.2 | 233.6 | 1982.8 | 169 | 149.9 | 211.7 | 137.7 | 320.8 |
| 86 | 135.5 | 108.9 | 106.9 | 95.7 | 105.4 | 93.8 | 73.7 | 117.7 |
| 87 | 127.6 | 465.3 | 323.2 | 95.3 | 403.9 | 62.8 | 157.6 | 1429.6 |
| 88 | 1283.6 | 2522.4 | 1743.7 | 11815.2 | 3616.8 | 446.2 | 3870.7 | 3025.4 |
| 89 | 256.7 | 275.1 | 477.6 | 154.3 | 289.3 | 541.1 | 134.8 | 307.1 |
| 90 | 116.5 | 131.5 | 622.1 | 230.7 | 165.3 | 129.6 | 92.9 | 171.2 |
| 91 | 1291.4 | 6737.9 | 681 | 75.2 | 942 | 526 | 142.5 | 8893.2 |
| 92 | 127.7 | 8921.7 | 3533.8 | 2067.5 | 4220.7 | 3041.6 | 9733.8 | 1770.2 |
| 93 | 120.4 | 181.9 | 160.9 | 277.6 | 309.8 | 97.6 | 147.2 | 189.7 |
| 94 | 1.3 | 950.7 | 333.4 | 626.4 | 1123.6 | 927.6 | 636 | 725.2 |
| 95 | 63.1 | 671.5 | 509.6 | 309 | 1194.2 | 87.6 | 1502.3 | 486 |
| 96 | 163.4 | 343.5 | 183.1 | 221 | 134.2 | 332.6 | 215.1 | 172.7 |
| 97 | 174.6 | 412.9 | 129.6 | 240.3 | 192.1 | 109.1 | 232 | 131.9 |
| 98 | 269 | 46.9 | 23.6 | 5.9 | 40.3 | 461.4 | 247.8 | 29.4 |
| 99 | 317.3 | 330.4 | 345.2 | 231.4 | 230 | 327.3 | 224.5 | 258.3 |
| 100 | 278.9 | 5487.5 | 4658.3 | 2977.6 | 17708.1 | 533.6 | 704.6 | 14117.2 |
| 101 | 148.9 | 470.7 | 172.2 | 240.4 | 366.1 | 137.6 | 433.1 | 297.3 |
| 102 | 267.2 | 130.3 | 143.5 | 163 | 138 | 256.5 | 184.4 | 174.4 |
| 103 | 345.9 | 454.6 | 332.2 | 322.3 | 296 | 331.9 | 319.9 | 317.1 |
| 104 | 620.8 | 254.8 | 155.1 | 500.3 | 426.6 | 538.2 | 415.4 | 490.4 |
| 105 | 676.6 | 264.2 | 231.1 | 551.9 | 371.6 | 831.1 | 467.2 | 475.1 |
| 106 | 832.7 | 268.5 | 316.9 | 494.6 | 516.3 | 767.4 | 474.1 | 471.9 |
| 107 | 214.1 | 396.6 | 1610.7 | 203.7 | 296.7 | 656.5 | 164.1 | 329.5 |
| 108 | 430.9 | 225.7 | 420.7 | 408.9 | 306.7 | 300.6 | 149.3 | 296.7 |
| 109 | 144.5 | 5293.3 | 3445.6 | 49.3 | 99.8 | 63.9 | 4951.6 | 88.8 |
| 110 | 156.2 | 13367.4 | 4936.4 | 1.2 | 133.1 | 66.6 | 10420.4 | 80.6 |
| 111 | 31.1 | 449 | 319.1 | 972.4 | 1746.3 | 72.4 | 634.6 | 1582.3 |
| 112 | 1208.7 | 915.8 | 358.6 | 513 | 445.2 | 79.8 | 1002.1 | 451.1 |
| 113 | 257 | 526.1 | 411.1 | 260 | 302.4 | 165.9 | 228.3 | 166.5 |
| 114 | 219.5 | 492.8 | 315.8 | 675.8 | 574.1 | 743.9 | 193.5 | 408.5 |
| 115 | 266.9 | 1153.1 | 535 | 357.9 | 489.5 | 1534.5 | 313.6 | 476.9 |
| 116 | 239.1 | 559.7 | 345 | 285.6 | 292.6 | 498.3 | 203 | 270.4 |
| 117 | 451.4 | 852.5 | 1167.1 | 3758.5 | 2636.4 | 220 | 694.6 | 1851.1 |
| 118 | 691.9 | 236.5 | 502.4 | 98.3 | 512.6 | 440.9 | 312.8 | 488.6 |
| 119 | 125.2 | 496.5 | 189.8 | 66 | 278.8 | 218.8 | 77.4 | 289.7 |
| 120 | 643.2 | 122 | 264.2 | 153.9 | 186.9 | 624.7 | 139.7 | 154 |
| 121 | 749.5 | 2913.7 | 860.2 | 336.8 | 764 | 1394.6 | 129.9 | 463.5 |
| 122 | 460.8 | 265.7 | 184.8 | 120.8 | 246 | 58.9 | 86.9 | 235.1 |
| 123 | 207.9 | 251.7 | 204.8 | 140.6 | 122.2 | 149.6 | 111.5 | 124.4 |
| 124 | 5670.9 | 155.5 | 148 | 368.2 | 165.8 | 183.3 | 107.3 | 167.1 |
| 125 | 1479.5 | 3998.5 | 753.1 | 813.4 | 967.4 | 1104.9 | 793.8 | 1004.9 |
| 126 | 762.9 | 199.8 | 558.9 | 519.5 | 1369.1 | 191.1 | 682.8 | 864.4 |
| 127 | 111.6 | 161.4 | 71.8 | 154.2 | 116.4 | 116.1 | 96.1 | 113.7 |
| 128 | 270.9 | 268.1 | 265.5 | 253.8 | 194.8 | 249.5 | 193.3 | 261.6 |
| 129 | 178.9 | 974.6 | 1280 | 192.4 | 245.5 | 216.2 | 155.5 | 1485 |
| 130 | 93.9 | 415 | 135.9 | 64 | 98.9 | 84.4 | 187.3 | 78.1 |
| 131 | 79.9 | 649 | 99.1 | 56.7 | 110.5 | 120.9 | 82.5 | 81.5 |
| 132 | 246.1 | 248.4 | 231.5 | 176.3 | 238.7 | 261 | 172.1 | 211 |
| 133 | 132.4 | 196 | 55.9 | 78.8 | 66.9 | 67.3 | 116.7 | 83.1 |
| 134 | 80.7 | 357.4 | 130 | 244.7 | 105.4 | 224.6 | 226.1 | 57.7 |
| 135 | 206.7 | 527.6 | 330.5 | 525.9 | 476.5 | 254.4 | 334.4 | 358.2 |
| 138 | 146.5 | 176.3 | 495.1 | 127.6 | 180.2 | 387 | 83.2 | 571.2 |
| 139 | 125.6 | 176.9 | 93.3 | 107.1 | 113.1 | 161 | 90.5 | 99 |
| 140 | 1.1 | 2124.9 | 375.1 | 3699.3 | 699.4 | 58.6 | 710.1 | 1623.8 |
| 141 | 39.2 | 1376.8 | 980.8 | 1472.7 | 1866.8 | 95.6 | 1265 | 1674.3 |
| 144 | 438.1 | 9635.2 | 440.9 | 420.6 | 469.1 | 364.9 | 21511.5 | 484.8 |
| 145 | 295.9 | 239.9 | 182.7 | 181.3 | 218.7 | 151.5 | 152.5 | 257.7 |
| 146 | 298.9 | 424.8 | 178.8 | 181 | 250.5 | 196.8 | 180.3 | 248.8 |
| 147 | 48.8 | 115.3 | 160 | 38.6 | 86.5 | 34.7 | 27.4 | 52.8 |
| 148 | 301.5 | 1046.2 | 1135.9 | 223.2 | 407.2 | 165.1 | 181.9 | 387.1 |
| 149 | 47.3 | 241.2 | 214.2 | 458.8 | 455.6 | 29.3 | 104.5 | 303.3 |
| 150 | 170 | 537.9 | 266.4 | 204.9 | 218.7 | 213.6 | 102.9 | 241.9 |
| 151 | 89.2 | 551.3 | 254.9 | 165.8 | 534.6 | 208.7 | 145 | 347.2 |
| 153 | 86.5 | 128.6 | 144.8 | 102.4 | 114 | 131.9 | 482.5 | 102.5 |
| 154 | 89.9 | 4360.8 | 958.8 | 781.1 | 686.3 | 354.2 | 99.8 | 1301.7 |
| 155 | 231.3 | 491.3 | 148.5 | 113.4 | 129.9 | 135.7 | 457.7 | 250.3 |
| 156 | 106.4 | 562.9 | 116.7 | 63.7 | 114.5 | 94.8 | 103.6 | 100.3 |
| 157 | 215.1 | 148.4 | 161 | 134.5 | 165.7 | 219 | 111.3 | 154.4 |
| 158 | 32.9 | 1321.3 | 40.5 | 1.2 | 17.3 | 60.4 | 325.4 | 9.7 |
| 159 | 599.7 | 2783.1 | 1317.4 | 2648.2 | 4295.6 | 54 | 3352.4 | 1844.5 |
| 161 | 46.4 | 2664.3 | 142.6 | 105.4 | 37 | 79.3 | 12174.8 | 49 |
| 162 | 70.2 | 205.9 | 2154.4 | 120.2 | 230.1 | 302.5 | 26.7 | 575.3 |
| 164 | 97.2 | 4519.6 | 284.1 | 80.3 | 241.1 | 136.1 | 4278.6 | 145.2 |
| 166 | 1463.3 | 1937 | 2689 | 6646.8 | 6511.9 | 2436.2 | 4573.3 | 3272.4 |
| 167 | 213.4 | 1628.1 | 728.3 | 2340.5 | 4783.1 | 39.7 | 2419 | 1862.8 |
| 168 | 46.2 | 1573.6 | 390.5 | 1142.4 | 452.1 | 470.9 | 298.3 | 741.5 |
| 169 | 5537.1 | 13680.4 | 14101.2 | 2418 | 4999.2 | 901.3 | 1483.3 | 4751.3 |
| 170 | 246.1 | 2210.5 | 661.2 | 1664.4 | 916.3 | 216.4 | 2618.5 | 589.3 |
| 171 | 163.7 | 592.2 | 6989.4 | 403.5 | 2812.8 | 5944.7 | 1.2 | 2024.1 |
| 172 | 503.1 | 636.3 | 612.7 | 637.8 | 678.8 | 382.4 | 649.1 | 592.8 |
| 173 | 438.7 | 1492.9 | 435.8 | 581.6 | 451.6 | 406.1 | 375.7 | 321.6 |
| 176 | 1.2 | 4078.3 | 151.3 | 721.4 | 41.7 | 21.5 | 659.5 | 126.2 |
| 177 | 504.8 | 573.3 | 573.5 | 497.6 | 548.9 | 188.7 | 524.1 | 641 |
| 178 | 763.2 | 2581.3 | 274.3 | 130.1 | 130.5 | 395.3 | 1441.3 | 106 |
| 179 | 143.7 | 1098.5 | 182.3 | 83.9 | 71.1 | 89.7 | 62.5 | 528.9 |
| 180 | 146.2 | 930.7 | 373.3 | 106 | 151.6 | 300.6 | 164 | 186.4 |
| 181 | 9206.5 | 6564.9 | 6165.7 | 13167.3 | 11548.7 | 1304.8 | 7115.7 | 9061 |
| 182 | 263.8 | 376.5 | 668.2 | 414.6 | 507 | 1400.6 | 232.9 | 393.9 |
| 183 | 1.2 | 395.2 | 3392.4 | 216.2 | 953.9 | 3944.8 | 144.7 | 1249.2 |
| 184 | 228.5 | 3067.2 | 599.8 | 207 | 334.4 | 400.4 | 10162.8 | 380.1 |
| 185 | 931 | 4108 | 3749.7 | 1981.6 | 1615.9 | 3634.4 | 834.2 | 6945.4 |
| 186 | 493.3 | 324.2 | 396.2 | 656.7 | 709.1 | 1183.3 | 453.3 | 462 |
| 187 | 96.3 | 258.3 | 1535.7 | 409.2 | 314.3 | 2757.2 | 67.4 | 650.9 |
| 188 | 66.9 | 405.5 | 832.9 | 151.3 | 247.2 | 306.9 | 89.3 | 144.4 |
| 189 | 70.6 | 239.2 | 289.3 | 112 | 199.7 | 237.6 | 59 | 78.6 |
| 190 | 1.3 | 1113.6 | 243.5 | 38 | 52 | 103.1 | 101.1 | 159.9 |
| 191 | 898.6 | 2228 | 2806.6 | 1788.2 | 1533.1 | 466 | 498.6 | 1912.7 |
| 192 | 103.7 | 377 | 267 | 65.3 | 134.7 | 128.9 | 66.1 | 119.5 |
| 193 | 140.5 | 752.9 | 580.6 | 2185.8 | 876.8 | 67.5 | 271.5 | 561.8 |
| 194 | 60.2 | 320.3 | 198.5 | 159.6 | 173.5 | 96 | 126.9 | 140.9 |
| 195 | 308.8 | 210.3 | 178.6 | 401.4 | 266.1 | 175.7 | 367.5 | 230.8 |
| 196 | 5889.2 | 6514.4 | 4504.5 | 4416.3 | 7685 | 183.7 | 6854.2 | 7068.9 |
| 197 | 374.5 | 81.9 | 129.2 | 108.8 | 122 | 174.9 | 68.1 | 178.1 |
| 198 | 95.3 | 300 | 73.2 | 42.5 | 55.8 | 86.5 | 39.2 | 77.1 |
| 199 | 87.1 | 7825.9 | 10594.6 | 51.3 | 344.6 | 74.9 | 63 | 274.1 |
| 200 | 130.8 | 511 | 514 | 170.4 | 544.7 | 475.6 | 154.9 | 259.7 |
| 201 | 1208.7 | 3427.4 | 3404.4 | 38.8 | 160.1 | 168.6 | 42.3 | 918.4 |
| 203 | 6000.1 | 982.6 | 359.1 | 96.8 | 204.8 | 46.1 | 331.8 | 188.3 |
| 204 | 206 | 700.4 | 262.9 | 650.9 | 591.3 | 846.3 | 674.6 | 437.2 |
| 205 | 1762.1 | 5866.2 | 3715.3 | 2132.7 | 5805.3 | 149.5 | 5381.1 | 2955.4 |
| 206 | 597.2 | 208.1 | 13097.8 | 301.2 | 1950.7 | 2675.5 | 252.6 | 329.8 |
| 207 | 77.6 | 602.1 | 745.6 | 352.7 | 484.2 | 308.4 | 1182.9 | 575 |
| 208 | 283.8 | 306.2 | 451.2 | 156.5 | 329.6 | 1044.1 | 156.9 | 149.8 |
| 209 | 254.3 | 1864.3 | 892.2 | 4970.4 | 5671.9 | 5534 | 2026.3 | 2662.4 |
| 211 | 262.3 | 3358.1 | 4615 | 29093.4 | 15999.8 | 393.6 | 7278.5 | 12689.2 |
| 212 | 1608.1 | 1431.5 | 332.2 | 551.6 | 514.2 | 482.4 | 786.4 | 353.9 |
| 213 | 3281.6 | 97.3 | 108.3 | 107.5 | 105.4 | 160 | 99.5 | 104.5 |
| 215 | 89.6 | 862.3 | 617 | 432.2 | 796.7 | 441.3 | 1738.3 | 806.2 |
| 216 | 333.1 | 284 | 385.1 | 651 | 910.8 | 264.4 | 588 | 601.9 |
| 217 | 224.3 | 1692 | 513.5 | 290.3 | 372.2 | 448.4 | 238.7 | 272.8 |
| 218 | 271.4 | 191 | 194.3 | 230.9 | 353.1 | 288.6 | 279.7 | 263.7 |
| 220 | 26824.2 | 132 | 73.9 | 124.1 | 470.8 | 129.2 | 103.4 | 350.5 |
| 221 | 215 | 1009.5 | 780.2 | 674.9 | 632.3 | 1487 | 406.7 | 578.3 |
| 223 | 352.8 | 388.2 | 438 | 286.9 | 203.4 | 160.1 | 124.3 | 1200.6 |
| 227 | 565.2 | 503.9 | 16406 | 1473.6 | 1813.5 | 2226.4 | 314.3 | 5151.9 |
| 228 | 624.4 | 455.2 | 331.2 | 808.6 | 799.2 | 205.8 | 683.1 | 604 |
| 229 | 1426.6 | 209.6 | 275.1 | 972.8 | 180.9 | 357.1 | 249.2 | 538.6 |
| 230 | 281.7 | 1542.1 | 611.5 | 209 | 207.8 | 215.8 | 97 | 574 |
| 231 | 2885.2 | 380.6 | 200 | 67.8 | 164.2 | 95.5 | 166.1 | 101.5 |
| 232 | 58 | 1351.9 | 13448.1 | 771.8 | 6104.8 | 19484.1 | 294.7 | 4379.3 |
| 233 | 2461.3 | 14608.9 | 11362.4 | 5629.1 | 11330.5 | 8712.7 | 1500.9 | 5870.1 |
| 235 | 317.4 | 465.1 | 5668.6 | 250.5 | 1690.5 | 2382.3 | 71.8 | 932.8 |
| 236 | 179.8 | 493.3 | 282.1 | 229.7 | 368.1 | 466.5 | 98.5 | 194.2 |
| 237 | 734 | 1979.9 | 2226.6 | 2347 | 1794.9 | 1757.7 | 790 | 2552.2 |
| 238 | 269.2 | 1084.1 | 803.1 | 718.3 | 1198.8 | 688.1 | 706.9 | 861.9 |
| 239 | 101.2 | 896.8 | 1025.8 | 156.8 | 1210.1 | 429.8 | 176 | 647.7 |
| 240 | 117.5 | 1116.1 | 1919.1 | 210.2 | 1169.1 | 420.8 | 189.3 | 1162.5 |
| 241 | 173.9 | 2109.5 | 3105.6 | 444 | 2419 | 956.7 | 341 | 2001 |
| 242 | 43673.6 | 18485.8 | 19181.5 | 4555.3 | 1630.4 | 3478.5 | 1273.2 | 10481.9 |
| 243 | 157.3 | 341.9 | 1232.7 | 219.9 | 483 | 699.2 | 82.1 | 1003.1 |
| 244 | 115 | 746.8 | 224.6 | 148.2 | 196.6 | 321 | 261 | 166.4 |
| 246 | 153.2 | 1046.6 | 224.3 | 103.9 | 143.7 | 173.8 | 1360.9 | 276.9 |
| 247 | 446 | 126.1 | 129.3 | 102.9 | 139 | 134.8 | 77.7 | 138.1 |
| 248 | 202.4 | 3011.8 | 309.9 | 182.5 | 128.8 | 133.9 | 1016.4 | 127.7 |
| 249 | 196.3 | 2527.3 | 1726.5 | 1395.5 | 337.1 | 271.3 | 233.7 | 469.7 |
| 251 | 386.5 | 1104.2 | 346.8 | 127.5 | 90.8 | 190.6 | 175.2 | 116.5 |
| 253 | 173.5 | 286.7 | 365.9 | 263 | 403.6 | 544.3 | 306.8 | 269.1 |
| 254 | 121 | 1348.6 | 394.8 | 73 | 434.2 | 259.8 | 554.3 | 264.1 |
| 255 | 953.8 | 2792.9 | 253.9 | 137.5 | 120.4 | 451.3 | 1497.2 | 98.4 |
| 256 | 1230.9 | 5411.2 | 704.5 | 85.2 | 918.6 | 465.8 | 224.1 | 7960.4 |
| 257 | 196 | 284.4 | 209 | 154.9 | 200.8 | 57.7 | 75.2 | 165.8 |
| 258 | 596.3 | 1068.8 | 1617.2 | 24.7 | 209.4 | 33.6 | 45.7 | 129.9 |
| 259 | 3.3 | 934.8 | 2120.9 | 131.2 | 687.3 | 806.3 | 46 | 531.9 |
| 260 | 248.3 | 182.9 | 167.4 | 127.1 | 173.3 | 209.8 | 128.2 | 198.6 |
| 261 | 19 | 401.9 | 345.1 | 1066.3 | 184.5 | 629.8 | 66.6 | 326.5 |
| 263 | 3859.5 | 516.2 | 662.8 | 577.5 | 720.7 | 535.7 | 488.6 | 407 |
| 263 | 418.6 | 1350.1 | 772.4 | 214.4 | 221.7 | 353.8 | 173.2 | 599.8 |
| 265 | 369.8 | 167.3 | 372.9 | 453.3 | 248.6 | 93.4 | 268.9 | 414.8 |
| 266 | 1779.8 | 263 | 318.1 | 407 | 491.3 | 511.1 | 236.7 | 401.1 |
| 256 | 117.2 | 391.4 | 130.1 | 92.5 | 181.8 | 142.5 | 146 | 152 |
| 268 | 120.1 | 1119 | 310.7 | 819.2 | 1655.3 | 121.7 | 645.8 | 1264.1 |
| 269 | 333.7 | 121.5 | 82.3 | 48 | 46.9 | 55.7 | 27.4 | 63.7 |
| 270 | 521.6 | 206.4 | 175.2 | 475.9 | 301.9 | 165.7 | 234.5 | 239.6 |
| 271 | 251.7 | 2043.7 | 362.9 | 255.5 | 197.7 | 227 | 225.6 | 192.4 |
| 272 | 620.4 | 563.5 | 600.9 | 411.3 | 451 | 639.9 | 426.2 | 524.5 |
| 273 | 136.7 | 2008 | 783.2 | 9402.2 | 3170.7 | 37.5 | 2967.5 | 1970.3 |
| 274 | 436.6 | 1279.4 | 1048.7 | 803.4 | 803.2 | 1605 | 278.3 | 616.8 |
| 275 | 267.1 | 1400.8 | 971.4 | 450.3 | 462.3 | 1341.1 | 238.2 | 2631.7 |
| 276 | 711.3 | 764 | 25930 | 2051.7 | 3808.8 | 5060.2 | 400.3 | 7898.3 |
| 277 | 188.1 | 213.8 | 210 | 151.7 | 217.1 | 196.7 | 161.8 | 199.4 |
| 278 | 65.7 | 1341 | 3512.1 | 262.6 | 1386.1 | 710.4 | 64.3 | 510.5 |
| 279 | 577.5 | 3255 | 2105.6 | 1256.3 | 3760.9 | 49.6 | 3058.3 | 2014.5 |
| 280 | 876.1 | 4218.8 | 2673.7 | 1739.2 | 3129.6 | 176.5 | 3883.1 | 2142.3 |
| 281 | 33.4 | 653.2 | 169.7 | 48.5 | 118.7 | 39 | 363.8 | 289 |
| 282 | 387.6 | 472.5 | 331.7 | 252.3 | 284.5 | 371.6 | 219.7 | 694.4 |
| 283 | 584.8 | 297.3 | 224 | 322.6 | 357.9 | 395.3 | 382.4 | 244 |
| 284 | 124.9 | 130.1 | 89.2 | 53.1 | 74.7 | 68.2 | 61.3 | 104.6 |
| 285 | 154 | 100.9 | 114.9 | 90.5 | 98.7 | 114.7 | 98.4 | 113.9 |
| 286 | 14.5 | 91.5 | 472.1 | 1032.5 | 277 | 1968 | 1525.5 | 442.2 |
| 287 | 744.2 | 114.2 | 131.4 | 94.7 | 147.1 | 127.5 | 65.1 | 206.5 |
| 288 | 245.8 | 103.9 | 143.6 | 161.5 | 162.8 | 177.7 | 112.5 | 161.4 |
| 289 | 231.3 | 5107.2 | 4629.4 | 93.7 | 1685.9 | 4764.5 | 141.9 | 2073.7 |
| 291 | 67.2 | 135.6 | 201.2 | 185.4 | 144.5 | 245.6 | 73.8 | 128.4 |
| 292 | 43.6 | 1910.5 | 2535.8 | 72.3 | 371.6 | 4192.7 | 50.7 | 206.7 |
| 293 | 63.9 | 1213.8 | 284.1 | 54.5 | 117 | 102.3 | 188.8 | 561 |
| 295 | 329 | 1994.3 | 668.6 | 211.8 | 267.3 | 97.1 | 684.5 | 3454 |
| 296 | 1451.1 | 1263.3 | 1341.5 | 761.3 | 1067.5 | 1967.3 | 758.9 | 687.7 |
| 297 | 593 | 73.8 | 109.1 | 49.4 | 123.5 | 88 | 42.9 | 364.8 |
| 298 | 360 | 444.6 | 275.9 | 300.9 | 273.2 | 358.5 | 306.5 | 436 |
| 299 | 1094.3 | 2223.7 | 794.8 | 1242.1 | 1051.7 | 1871.6 | 1233.7 | 605.2 |
| 300 | 186 | 1200.8 | 322.3 | 408.7 | 137.5 | 150.8 | 1157.7 | 233.1 |
| 301 | 250.2 | 525.4 | 365.9 | 4246.8 | 594.8 | 155.1 | 545.6 | 329.5 |
| 302 | 28.2 | 82.4 | 44.3 | 22.7 | 36.1 | 25.7 | 6.3 | 27.7 |
| 303 | 1397.3 | 375.7 | 390.8 | 921 | 836.9 | 531.6 | 689.2 | 589 |
| 304 | 485.2 | 1102.9 | 799.5 | 659.6 | 239.7 | 1106.9 | 120.6 | 501.1 |
| 305 | 1523.9 | 661.1 | 201.8 | 144.2 | 192.3 | 247.8 | 195.8 | 173 |
| 306 | 222.8 | 363.6 | 184.3 | 150.2 | 197.8 | 184.8 | 128.9 | 208.3 |
| 307 | 180.1 | 571.1 | 188 | 169.2 | 150.6 | 127.7 | 165.3 | 198 |
| 308 | 3026.7 | 857.8 | 1219.5 | 1191.4 | 1726.2 | 64.1 | 1855.4 | 1201.9 |
| 310 | 932.8 | 136.9 | 271.1 | 1036.8 | 498.7 | 99 | 290.2 | 343.2 |
| 311 | 48.5 | 360 | 99.1 | 180.9 | 152.4 | 76.1 | 167.7 | 104.5 |
| 312 | 4628 | 5 | 236.7 | 2257.7 | 1039.8 | 66 | 643.8 | 643 |
| 313 | 126.7 | 420.1 | 135.6 | 121 | 78.1 | 101 | 622.3 | 132.7 |
| 314 | 119.1 | 1765 | 872.1 | 133.6 | 629.1 | 211.4 | 112.9 | 473 |
| 315 | 141.7 | 212.9 | 441.6 | 286.4 | 519.9 | 1377.8 | 271.7 | 192.2 |
| 316 | 119.8 | 562.5 | 354.9 | 220.7 | 270.5 | 441.8 | 189.1 | 436.3 |
| 317 | 178.4 | 694.3 | 216.3 | 177.3 | 204.7 | 218.1 | 156.9 | 178.7 |
| 318 | 28.3 | 646.1 | 105.3 | 30.6 | 143.4 | 43.8 | 88.5 | 101.1 |
| 319 | 1682.7 | 339.1 | 154 | 339.5 | 190.3 | 129.4 | 447.1 | 293.2 |
| 320 | 816.1 | 326.7 | 425.5 | 913.6 | 680.7 | 459.9 | 482.1 | 501.5 |
| 321 | 360.2 | 245.2 | 811.4 | 486.9 | 413.3 | 931.3 | 260.1 | 454.2 |
| 322 | 604.1 | 279.1 | 205.3 | 203 | 203.2 | 198.1 | 215.6 | 180.1 |
| 323 | 620.6 | 4592.1 | 1478.5 | 13669.8 | 1883 | 297 | 3464 | 1551 |
| 324 | 106.1 | 478.7 | 118.1 | 131.8 | 77.6 | 74.8 | 294.8 | 56.2 |
| 325 | 255.2 | 515.4 | 238.4 | 250.8 | 279.1 | 142.4 | 597.5 | 247.7 |
| 326 | 318.5 | 3462.4 | 2655.2 | 2527.1 | 3852.6 | 220.7 | 891.6 | 2803.7 |
| 327 | 64.1 | 44.3 | 86.6 | 1.3 | 52 | 25.3 | 11.5 | 100.1 |
| 328 | 58.8 | 534.2 | 264.2 | 543.1 | 719.4 | 95.4 | 544.4 | 515.6 |
| 329 | 122.4 | 66.8 | 60.1 | 62.8 | 59.5 | 91.3 | 45.4 | 74.1 |
| 330 | 49 | 1131.8 | 126.4 | 41.5 | 57.5 | 131.5 | 31.9 | 64 |
| 331 | 632.1 | 258 | 263 | 307.2 | 275.1 | 480 | 248.3 | 284.1 |
| 333 | 147 | 285.7 | 369.3 | 854.9 | 519 | 285.3 | 603 | 413.2 |
| 334 | 129 | 302.9 | 300.5 | 121 | 170.3 | 145.9 | 129.4 | 211.5 |
| 335 | 215.5 | 628.5 | 174.5 | 108 | 107.2 | 135.9 | 51.5 | 116.8 |
| 336 | 358.7 | 245.7 | 230.7 | 382.1 | 500.4 | 819.1 | 394.5 | 415.4 |
| 337 | 105.8 | 1112.7 | 1023.2 | 358 | 235.6 | 1517.6 | 97.2 | 364 |
| 338 | 134.6 | 567.8 | 499.9 | 131.2 | 238.2 | 332.7 | 132 | 278.1 |
| 339 | 335.4 | 352.2 | 311 | 385 | 625.4 | 323.2 | 314.7 | 428.2 |
| 340 | 303.2 | 343.2 | 263.9 | 231 | 263.3 | 223.5 | 177.2 | 315.9 |
| 341 | 408.4 | 464.7 | 438.1 | 1146.6 | 803.2 | 349.7 | 511.1 | 757.8 |
| 343 | 1287 | 814.6 | 228 | 123.5 | 59.8 | 75.2 | 658.4 | 97.9 |
| 344 | 2683.4 | 670.4 | 822.4 | 1937.2 | 1561.2 | 1319.5 | 1187.9 | 1110.2 |
| 345 | 270.8 | 356.3 | 270.7 | 213.6 | 219.2 | 281.7 | 199.4 | 223.6 |
| 347 | 321.3 | 3161.8 | 1516.8 | 2286.9 | 3928.3 | 682.1 | 1998.6 | 3960.1 |
| 348 | 592.8 | 6727.1 | 3096.6 | 4465.5 | 7652.3 | 3345.7 | 4616.8 | 6087.1 |
| 349 | 213.8 | 458.9 | 441.6 | 165.6 | 239.7 | 177.8 | 310.8 | 270.7 |
| 350 | 139.5 | 477.9 | 625.9 | 282.7 | 381.8 | 1996.1 | 328.4 | 149.7 |
| 351 | 45.6 | 2277.1 | 515.7 | 158 | 453.8 | 105.4 | 294.7 | 668.6 |
| 352 | 470.6 | 167.1 | 213.9 | 516.8 | 305.7 | 2359 | 246.1 | 210.6 |
| 353 | 792.6 | 308.9 | 297.2 | 170.8 | 260.9 | 153.9 | 208.2 | 337.5 |

3h

| SEQ ID NO: | 914TT | 915TT | 917TT | 918TT | 919TT | 920TT | 921TT | 922TT |
|---|---|---|---|---|---|---|---|---|
| 354 | 71.9 | 52.3 | 102.4 | 6332.8 | 339.5 | 28.3 | 586.4 | 1.1 |
| 355 | 77.9 | 90.7 | 59.8 | 865.8 | 218.8 | 75.4 | 827.6 | 77.1 |
| 356 | 309.5 | 389.3 | 791.7 | 762.2 | 694.7 | 578.2 | 1581.5 | 949.2 |
| 357 | 238.7 | 565.6 | 645.2 | 593.2 | 611.7 | 800.3 | 666.9 | 768.9 |
| 358 | 812.3 | 933.3 | 620.4 | 729.2 | 758.3 | 710.1 | 556.9 | 571.9 |
| 359 | 399.3 | 508 | 376.9 | 330 | 320.8 | 353.6 | 299.6 | 506 |
| 362 | 527.8 | 508.3 | 517.3 | 1171.8 | 669.6 | 758.3 | 407.4 | 431.6 |
| 360 | 287.6 | 262.1 | 276.8 | 458.5 | 477.6 | 256.8 | 248.9 | 297.3 |
| 361 | 153.4 | 816.8 | 853.1 | 453.3 | 532.5 | 1170.9 | 1300 | 542.2 |
| 363 | 631.4 | 726.4 | 557.1 | 448.6 | 429.4 | 599.4 | 429.9 | 590.7 |
| 1 | 770.6 | 362.7 | 797.9 | 661.6 | 799.3 | 756.1 | 848.9 | 856.2 |
| 2 | 481 | 3910.3 | 1810.9 | 1338.3 | 3134.1 | 3947 | 4719 | 2783.8 |
| 7 | 299.1 | 2389.1 | 790.1 | 343.4 | 419.8 | 1494.7 | 829.3 | 845.9 |
| 8 | 614.3 | 810.2 | 763.6 | 1902.7 | 1081.7 | 629.1 | 831.6 | 938.2 |
| 9 | 524.5 | 1890.1 | 9055.3 | 9890.7 | 8192.7 | 2264.6 | 3685.8 | 10424.8 |
| 10 | 169.8 | 317.6 | 42 | 79.2 | 58.4 | 136.2 | 120 | 40.5 |
| 11 | 146 | 141.2 | 351.8 | 282.6 | 234.9 | 269.5 | 274.6 | 155.7 |
| 13 | 104.4 | 96.3 | 115.4 | 412.7 | 501.8 | 91 | 136.4 | 182.4 |
| 14 | 150.5 | 149.2 | 276.7 | 1839.8 | 1222 | 149.8 | 335.3 | 427.4 |
| 15 | 83.6 | 639.9 | 331.3 | 203.1 | 1168.9 | 304.5 | 277.5 | 582.7 |
| 16 | 834 | 740.5 | 1080.2 | 1040.9 | 977.4 | 761 | 1018.5 | 1197.7 |
| 17 | 95.8 | 775.8 | 1324.9 | 1290.5 | 1245.3 | 1170.3 | 1306.3 | 917.3 |
| 19 | 261.4 | 404.1 | 541.1 | 316.8 | 4263.1 | 155.9 | 150.6 | 3899.9 |
| 20 | 1.3 | 44.2 | 15.6 | 83.6 | 83 | 31 | 1.4 | 1.1 |
| 21 | 383.4 | 16.8 | 145.6 | 554.6 | 432 | 35.5 | 42.5 | 144.6 |
| 22 | 483.4 | 7044.6 | 9872.2 | 5621.2 | 6671.8 | 7593.9 | 4117.5 | 6209.5 |
| 23 | 1.2 | 758 | 271.8 | 277.7 | 2394.8 | 1.1 | 325.3 | 627.9 |
| 24 | 29 | 304.7 | 103.5 | 271.5 | 469.3 | 49.8 | 178.9 | 196.8 |
| 26 | 161.3 | 2148.7 | 2238.7 | 435.1 | 15713.7 | 60.3 | 774.4 | 7022.3 |
| 27 | 2027.3 | 253.6 | 510.6 | 701 | 703.8 | 324.3 | 324 | 728.4 |
| 29 | 167.6 | 74.4 | 68.6 | 190.8 | 125.6 | 73.1 | 84.8 | 170.1 |
| 30 | 1.1 | 246 | 188 | 525.7 | 759.9 | 74.5 | 129.7 | 286.6 |
| 31 | 256.3 | 146 | 449.7 | 1402.9 | 328.4 | 110.8 | 218.2 | 222.7 |
| 33 | 69.4 | 1248.9 | 534.4 | 1635.5 | 1154 | 322.1 | 691.6 | 434.8 |
| 34 | 2249.5 | 2411.8 | 4154.5 | 3039.8 | 4215.7 | 4564.8 | 2908.5 | 3979 |
| 35 | 118.8 | 296.6 | 55.5 | 1050.9 | 413 | 100.2 | 126.5 | 95 |
| 36 | 230.8 | 313.4 | 160.9 | 183.5 | 250.9 | 153.4 | 140.4 | 242.6 |
| 37 | 313.2 | 317.7 | 214.6 | 190.8 | 269.8 | 183.3 | 173.6 | 197.9 |
| 38 | 61.3 | 851.9 | 351.3 | 1044.4 | 981.7 | 465.1 | 612.9 | 276.6 |
| 40 | 719.3 | 813.3 | 549.5 | 535.4 | 513 | 829.2 | 442.3 | 543.7 |
| 41 | 172.6 | 171 | 190 | 284.7 | 581.1 | 145.2 | 362.8 | 549.8 |
| 42 | 343.9 | 273.7 | 144 | 130.6 | 210.4 | 229.7 | 202.5 | 160 |
| 43 | 1155.5 | 721.6 | 513.5 | 373.6 | 260 | 617.8 | 269.7 | 355.8 |
| 44 | 467.8 | 606.3 | 633.6 | 727.9 | 790.8 | 640 | 420.7 | 335.6 |
| 45 | 1102.5 | 638.1 | 519.3 | 594.7 | 368.8 | 478.2 | 608.5 | 404.8 |
| 46 | 443.3 | 467.6 | 402.9 | 285.6 | 318.8 | 295.6 | 260.9 | 360.4 |
| 47 | 246.9 | 143.9 | 102.7 | 241.9 | 285.2 | 145.3 | 226 | 182.5 |
| 48 | 48.2 | 197.7 | 222.2 | 49.7 | 1024.9 | 23 | 23 | 465.8 |
| 49 | 234.5 | 355.6 | 207.3 | 1446.9 | 736.1 | 344.1 | 252.2 | 364.3 |
| 50 | 42 | 399.9 | 174.3 | 301.5 | 536.5 | 71.4 | 207.3 | 223.1 |
| 51 | 444.2 | 59.2 | 128.9 | 228.8 | 73.7 | 65.9 | 19.4 | 52.1 |
| 52 | 203.3 | 187.7 | 224 | 202.7 | 200.7 | 180.8 | 198.3 | 190.4 |
| 53 | 186.9 | 1.2 | 213.7 | 202.1 | 69.2 | 75.4 | 108.4 | 128.1 |
| 54 | 684.7 | 417.1 | 501.3 | 720.5 | 410.5 | 294 | 509.8 | 366.4 |
| 55 | 129.4 | 96.5 | 115.6 | 98.9 | 115.5 | 100.7 | 94.9 | 72.2 |
| 56 | 247.2 | 93.8 | 50 | 62 | 65.7 | 100.5 | 74 | 62.3 |
| 57 | 713.4 | 745.5 | 417.1 | 4396.2 | 674.3 | 127.1 | 1311.9 | 226 |
| 58 | 679.3 | 672.7 | 334.5 | 5289.1 | 905 | 113.7 | 1260.3 | 158.8 |
| 59 | 1114.3 | 488.5 | 1847.4 | 1440.1 | 1675.2 | 906.2 | 2348 | 1103.1 |
| 60 | 160.5 | 166.8 | 216.5 | 231.6 | 179.7 | 142.2 | 165.1 | 203.4 |
| 61 | 293.8 | 239.7 | 136.1 | 128 | 145.9 | 155.4 | 122.5 | 116.8 |
| 62 | 2975 | 2562.6 | 1652.4 | 1873.2 | 1527 | 526 | 60.4 | 3206.2 |
| 63 | 144.6 | 161.3 | 490.3 | 578.9 | 239.3 | 242 | 239.6 | 251.9 |
| 64 | 1905.1 | 179 | 138 | 290.9 | 184.1 | 124 | 138.2 | 156.2 |
| 65 | 54 | 106 | 187.6 | 155.7 | 243.6 | 75 | 166.3 | 146.9 |
| 66 | 676.3 | 527.1 | 840.5 | 1026.2 | 765.5 | 627.5 | 1284.4 | 290.3 |
| 67 | 33082 | 52249.5 | 37966 | 30570.8 | 32361.9 | 42996.5 | 29286 | 39242.9 |
| 68 | 4579.1 | 7275.8 | 2857.3 | 1137.2 | 4016.2 | 7822.9 | 2361.2 | 3436.9 |
| 69 | 7472.6 | 15249.7 | 5078.7 | 2335.4 | 5252.6 | 10446.3 | 7213.9 | 6679.9 |
| 70 | 9607.7 | 1458 | 3227.3 | 1337.8 | 1473.1 | 1664.6 | 444 | 1375.9 |
| 71 | 234 | 129.9 | 307.4 | 332.1 | 2083.3 | 87 | 105.8 | 493.5 |
| 72 | 117.7 | 616.5 | 195.6 | 1937.6 | 446.3 | 359.7 | 707 | 166.5 |
| 73 | 299.5 | 310.6 | 290.6 | 264.1 | 473 | 267.6 | 370.2 | 457.7 |
| 75 | 167.6 | 215.7 | 252.1 | 193 | 312.5 | 406 | 77.3 | 143.2 |
| 76 | 987.1 | 33.3 | 18.9 | 74.9 | 191.4 | 9.9 | 122.1 | 134.1 |
| 77 | 3486.8 | 9405.2 | 5866.2 | 3917.2 | 3054.2 | 10710.9 | 3845.4 | 7445 |
| 78 | 322.9 | 806.6 | 1125.4 | 721.3 | 791.7 | 1090.1 | 887.2 | 548.7 |
| 79 | 156.3 | 75.4 | 84.6 | 199.2 | 122.3 | 105 | 76.6 | 133.8 |
| 80 | 577.4 | 115.1 | 104.4 | 407.6 | 226.3 | 186.6 | 758.9 | 124.9 |
| 81 | 120.4 | 121.1 | 187.8 | 1222.5 | 315.8 | 185 | 177.3 | 358 |
| 82 | 480.2 | 436.7 | 398.1 | 285.9 | 256.1 | 480.6 | 350.3 | 306.7 |
| 84 | 122.6 | 108.4 | 185.4 | 180.2 | 503.7 | 117.8 | 89.6 | 217.3 |
| 85 | 172.1 | 158.7 | 146.6 | 1050.6 | 166.4 | 134.4 | 197.3 | 142.6 |
| 86 | 99.3 | 87.7 | 80.9 | 78.1 | 93.6 | 56 | 77.2 | 98.4 |
| 87 | 346.4 | 214.6 | 478.3 | 693.6 | 282.7 | 172 | 329.4 | 231.5 |
| 88 | 2119.7 | 12099.4 | 6271.8 | 3285.9 | 4646.7 | 8968.2 | 1915.3 | 9385.7 |
| 89 | 308.6 | 290.4 | 303 | 232.4 | 299.7 | 233.4 | 163.8 | 190.9 |
| 90 | 98.7 | 279.4 | 108.4 | 89 | 113.4 | 81.7 | 100.6 | 149.5 |
| 91 | 582.6 | 482.3 | 275 | 6847.8 | 528.1 | 61.1 | 1397.9 | 71.5 |
| 92 | 2641.5 | 1419.6 | 2112.8 | 3432 | 3134.2 | 1442.4 | 4677.3 | 2547 |
| 93 | 88.7 | 211.3 | 338.9 | 402.7 | 236.9 | 286.5 | 297.3 | 310.6 |
| 94 | 89.7 | 1072.4 | 937.7 | 516.7 | 1228 | 974.1 | 1427 | 1237.6 |
| 95 | 510.2 | 756.1 | 652.5 | 461.5 | 647.6 | 779.5 | 500.1 | 747.8 |
| 96 | 142.3 | 129.6 | 170.2 | 169.9 | 161.5 | 179.1 | 155.6 | 168.2 |
| 97 | 169.9 | 186.3 | 239.2 | 240.4 | 173.7 | 176.8 | 317.9 | 243.4 |
| 98 | 37 | 25.2 | 39.9 | 87.1 | 52.8 | 25.5 | 28.4 | 39.9 |
| 99 | 287.4 | 268.3 | 235.3 | 210.6 | 248.3 | 226.3 | 210.8 | 292.3 |
| 100 | 289.9 | 8016.1 | 3817.9 | 5438.1 | 6332.1 | 6494.4 | 1146 | 13390 |
| 101 | 271.7 | 593.1 | 444.8 | 210.9 | 231.5 | 571.7 | 327.5 | 268.8 |
| 102 | 244.7 | 270.9 | 155.8 | 164.2 | 185.3 | 197.2 | 148.5 | 149 |
| 103 | 359.8 | 424.3 | 368.8 | 345.3 | 325.6 | 402.3 | 249.8 | 390.8 |
| 104 | 582.6 | 395.2 | 757 | 373.7 | 448.9 | 715.7 | 422.8 | 1046.9 |
| 105 | 605.4 | 439.1 | 711.2 | 498.5 | 563 | 713.5 | 478.7 | 844.5 |
| 106 | 573.3 | 421.3 | 707.9 | 394.3 | 496.4 | 727.1 | 411.8 | 1158.6 |
| 107 | 342.9 | 313.4 | 232.5 | 633.3 | 349.9 | 97.4 | 256.3 | 159.1 |
| 108 | 374.4 | 509.1 | 404.5 | 447.5 | 424 | 395.3 | 507 | 313.7 |
| 109 | 70.1 | 48.4 | 100.4 | 1071.3 | 216 | 52.3 | 605.8 | 112.2 |
| 110 | 1.3 | 1.1 | 56.4 | 2298.1 | 314.9 | 11.2 | 1496.5 | 175 |
| 111 | 618.4 | 1832.7 | 1179.5 | 1928 | 929.6 | 2094.9 | 301.9 | 2011.4 |
| 112 | 925.8 | 306.9 | 118.6 | 634.8 | 404.2 | 186.5 | 159.1 | 438 |
| 113 | 222.3 | 166.6 | 157.8 | 240.9 | 191.7 | 283.5 | 59.8 | 260.2 |
| 114 | 192.2 | 388.8 | 475 | 452.6 | 701.1 | 833.9 | 536.1 | 428.3 |
| 115 | 744.1 | 403.4 | 380.9 | 477.3 | 722 | 354.5 | 316 | 403.1 |
| 116 | 74 | 256.2 | 288.5 | 251.7 | 354.9 | 244.7 | 200.7 | 290.2 |
| 117 | 124.2 | 3117.3 | 3370.9 | 1392.1 | 2479.3 | 3139.4 | 3082.9 | 1506.6 |
| 118 | 45.9 | 127.9 | 220.2 | 543.8 | 654.1 | 106.6 | 76 | 302.5 |
| 119 | 73.6 | 109.6 | 79.5 | 187.2 | 253.7 | 129 | 89.7 | 180.1 |
| 120 | 63 | 151.9 | 118.9 | 83.3 | 329.6 | 139.5 | 96.5 | 196 |
| 121 | 49.1 | 198.1 | 1209.5 | 1344.6 | 731.2 | 553.5 | 930.8 | 1026.3 |
| 122 | 325.5 | 74.7 | 168.8 | 279.7 | 220 | 128.3 | 73.4 | 226.7 |
| 123 | 191.5 | 158.6 | 161.6 | 149.7 | 200.5 | 180.6 | 123.1 | 147.8 |
| 124 | 208.1 | 325.2 | 147.4 | 136 | 144.3 | 215.6 | 157.8 | 152.9 |
| 125 | 1661.5 | 1623.3 | 1124.6 | 933.3 | 856.1 | 1323.7 | 974.7 | 1239.4 |
| 126 | 336.6 | 998.6 | 1518 | 1111.4 | 1195.1 | 749.3 | 1734.3 | 1307.5 |
| 127 | 114.1 | 160.9 | 127 | 108.1 | 99.9 | 108.8 | 94.3 | 121.3 |
| 128 | 377.5 | 502 | 304.4 | 273.4 | 240.5 | 360.7 | 256.7 | 248.3 |
| 129 | 152 | 156.1 | 228.4 | 614.3 | 248.8 | 187.1 | 182.1 | 174.4 |
| 130 | 201.8 | 125.2 | 123.1 | 91.1 | 86.5 | 146.4 | 126 | 102.5 |
| 131 | 171.6 | 96.4 | 92.7 | 100.4 | 74.1 | 81.2 | 64.7 | 62 |
| 132 | 194.7 | 290.5 | 224 | 204.2 | 202.2 | 246.9 | 198.3 | 213.9 |
| 133 | 185.3 | 28.5 | 90.5 | 95.6 | 99.8 | 53.6 | 115.1 | 67.8 |
| 134 | 108.7 | 105.8 | 146.2 | 129.8 | 136.1 | 152.6 | 101.4 | 104.9 |
| 135 | 329.3 | 300.4 | 422.9 | 350.2 | 459.4 | 315.2 | 405.3 | 583.7 |
| 138 | 141.3 | 138.1 | 148 | 138 | 261.5 | 129.3 | 112.3 | 140.1 |
| 139 | 64.7 | 72.7 | 91.7 | 113 | 89.4 | 72.3 | 78.5 | 70.3 |
| 140 | 12.8 | 3594.2 | 546.1 | 1731 | 1815.6 | 2735.6 | 7476.3 | 1203.1 |
| 141 | 765 | 2165 | 2264.2 | 1694.9 | 2113.3 | 2212.9 | 1964.9 | 2552.8 |
| 144 | 557.3 | 658.9 | 531.9 | 445.9 | 506.1 | 576 | 448.1 | 498.5 |
| 145 | 293.6 | 414.8 | 253.6 | 213.1 | 181.7 | 238.7 | 218 | 282.1 |
| 146 | 346.7 | 292.7 | 269.6 | 217.1 | 213.1 | 208.1 | 211.4 | 258.4 |
| 147 | 62.7 | 79.5 | 46.1 | 53.8 | 81.9 | 58.5 | 49.8 | 63.7 |
| 148 | 269.9 | 289.4 | 334.4 | 865.9 | 508.3 | 260.4 | 407.4 | 281.3 |
| 149 | 97.4 | 236.4 | 437.2 | 418.5 | 394.6 | 307.1 | 973.7 | 534.2 |
| 150 | 137.6 | 243.5 | 188.6 | 496 | 186.8 | 175.5 | 160 | 154.5 |
| 151 | 127.6 | 135.7 | 166.9 | 264 | 342.2 | 154.3 | 155.1 | 238.1 |
| 153 | 123.6 | 100.3 | 115.7 | 116.3 | 102.4 | 89.5 | 160.7 | 101.3 |
| 154 | 85 | 197.4 | 1113.2 | 453.2 | 438.4 | 272.8 | 68.6 | 476.9 |
| 155 | 278.9 | 193.9 | 179.6 | 197.2 | 142.9 | 121 | 155.5 | 125.7 |
| 156 | 223.2 | 67.3 | 125 | 73.3 | 134.8 | 87.9 | 62.7 | 94.5 |
| 157 | 191.4 | 141 | 80.7 | 108 | 126.5 | 132.4 | 139.9 | 153.4 |
| 158 | 120.4 | 27.9 | 18.7 | 22.2 | 13.5 | 8.3 | 48.3 | 1.1 |
| 159 | 2173.3 | 3351 | 4458.5 | 2838.9 | 3155.5 | 4574.9 | 3436 | 5276.1 |
| 161 | 321.7 | 4.9 | 48.5 | 38.3 | 51.1 | 73.2 | 32.3 | 115.5 |
| 162 | 57.7 | 109.5 | 90.4 | 127 | 451.2 | 53.5 | 97.4 | 109.9 |
| 164 | 18.3 | 107.3 | 133.5 | 945.5 | 294.7 | 100.8 | 471.3 | 145 |
| 166 | 1789.6 | 8438 | 8113.2 | 9464 | 4481.5 | 10514.2 | 6218.7 | 8586.9 |
| 167 | 1221.4 | 1687.4 | 2694.8 | 870.2 | 2235.2 | 3402.4 | 2967 | 3999.6 |
| 168 | 1134.1 | 1571.9 | 233.8 | 389.6 | 470.2 | 1162.3 | 676.1 | 517.9 |
| 169 | 1299.1 | 3874.8 | 2937.3 | 20149.3 | 4579.7 | 3975.5 | 5507.1 | 3449.1 |
| 170 | 496.6 | 1040.8 | 993.1 | 1421.7 | 1194.6 | 1747 | 1725.6 | 975.7 |
| 171 | 1.7 | 726.5 | 381.8 | 1172.2 | 3538.7 | 1.7 | 311.2 | 923.1 |
| 172 | 787.9 | 831.5 | 671.7 | 556.8 | 576.2 | 725.4 | 702.2 | 758.7 |
| 173 | 325.2 | 174.5 | 231.2 | 453.8 | 404 | 104.2 | 388.1 | 164.7 |
| 176 | 1.1 | 61.7 | 1.1 | 901.4 | 45.4 | 116.1 | 25.7 | 13.1 |
| 177 | 1168.1 | 892.5 | 744.8 | 380 | 424.7 | 794 | 561 | 663.6 |
| 178 | 1040.7 | 147.4 | 125.3 | 225.6 | 118 | 65.1 | 137.1 | 105.3 |
| 179 | 175.2 | 142.5 | 80.7 | 229.8 | 86.5 | 162.9 | 95.4 | 82.1 |
| 180 | 219.9 | 159.1 | 69.7 | 168.4 | 130.9 | 108.4 | 102 | 102.9 |
| 181 | 7935.3 | 13498.8 | 13730.6 | 11985.5 | 10419.5 | 12804.4 | 11323.8 | 12979.3 |
| 182 | 150.3 | 447.5 | 499.1 | 465.6 | 614.8 | 394.1 | 697.3 | 535.6 |
| 183 | 1.2 | 302 | 315.6 | 55.7 | 3038.8 | 1.1 | 111.6 | 870.4 |
| 184 | 164.6 | 304.5 | 220.8 | 214.1 | 342.7 | 208.6 | 235.9 | 282.7 |
| 185 | 339.5 | 1227.3 | 1316 | 2812.4 | 2324.1 | 1291.1 | 801.3 | 951.8 |
| 186 | 1007.5 | 586.1 | 520.9 | 357.3 | 592.2 | 596 | 427.6 | 531 |
| 187 | 105.8 | 150.7 | 121.4 | 138.6 | 346.7 | 114.5 | 71.7 | 179.7 |
| 188 | 90.9 | 117.6 | 131.9 | 111.7 | 401.8 | 185.4 | 95.3 | 186.5 |
| 189 | 44.7 | 89.1 | 89.1 | 75.5 | 222.5 | 76.8 | 62.8 | 140 |
| 190 | 387.4 | 103.3 | 160.9 | 193.8 | 110.4 | 132.3 | 17.1 | 290.6 |
| 191 | 1052.5 | 301.2 | 1095.5 | 2271.6 | 1145.2 | 677.5 | 637 | 486.6 |
| 192 | 630.6 | 99.9 | 111.6 | 214 | 209.1 | 70.9 | 85.5 | 102.3 |
| 193 | 74.3 | 2980.5 | 1451.8 | 1464.1 | 967.9 | 3258.6 | 1246.7 | 1115.3 |
| 194 | 103.9 | 95.6 | 148.6 | 197.7 | 173.4 | 182.1 | 182.9 | 151.6 |
| 195 | 232 | 517.9 | 233.4 | 227.6 | 231.8 | 371.1 | 311.1 | 252.3 |
| 196 | 14368.7 | 9559.4 | 6515.4 | 4725.2 | 6534.5 | 6168.5 | 3594.5 | 10426.2 |
| 197 | 174.7 | 101.2 | 74.1 | 54.7 | 170.5 | 108.4 | 82.8 | 122.4 |
| 198 | 91 | 135.6 | 56.6 | 60.3 | 89.4 | 59.6 | 45.6 | 59.4 |
| 199 | 61 | 139.7 | 76.3 | 1103.8 | 315.1 | 93.4 | 1137.5 | 145 |
| 200 | 174.8 | 227.8 | 166 | 143.6 | 811.9 | 124 | 150.7 | 494.8 |
| 201 | 97.8 | 40.6 | 125.1 | 6018.8 | 363.4 | 16.6 | 745.3 | 54 |
| 203 | 248.8 | 51.5 | 202.6 | 274 | 233 | 114.9 | 678.6 | 137.4 |
| 204 | 355.2 | 445.7 | 563 | 594.4 | 551.8 | 780.5 | 259.1 | 741.3 |
| 205 | 3081.7 | 3669.5 | 4544.7 | 4530.2 | 5821 | 4180.6 | 2864.1 | 6443.9 |
| 206 | 635.1 | 335.2 | 212.1 | 203.2 | 2002.9 | 327.3 | 212.8 | 296.9 |
| 207 | 108.8 | 465.2 | 1154 | 1017.8 | 856.5 | 253.4 | 2406.9 | 982.7 |
| 208 | 376.1 | 87.8 | 163.3 | 235.1 | 433.7 | 162 | 209.8 | 341.4 |
| 209 | 4098 | 6563.6 | 5001.8 | 2151.6 | 3441.1 | 5849.7 | 5350.8 | 5424.3 |
| 211 | 13293.2 | 56352.5 | 27543 | 16362.2 | 12402.5 | 30128.4 | 25478.3 | 26582.6 |
| 212 | 3366.9 | 504.5 | 937.3 | 451.1 | 493.9 | 512.1 | 182 | 356.5 |
| 213 | 557 | 72.1 | 102.2 | 72.7 | 87.2 | 125.6 | 68.6 | 84.7 |
| 215 | 69.6 | 611.1 | 1358.5 | 1255.1 | 1026.1 | 288 | 5253.8 | 1589.5 |
| 216 | 307.4 | 418 | 1035.4 | 885.1 | 913.2 | 784.3 | 771.5 | 663.5 |
| 217 | 122.9 | 221.4 | 276.8 | 282.9 | 382.1 | 276 | 250.6 | 310.7 |
| 218 | 405.2 | 348.1 | 325 | 389.5 | 308.3 | 374.2 | 366.4 | 279.9 |
| 220 | 133.1 | 120.1 | 104.4 | 90.8 | 74 | 87.2 | 60.6 | 104.9 |
| 221 | 202.1 | 462 | 707.8 | 738.8 | 744.5 | 462.6 | 507.6 | 536.4 |
| 223 | 401.3 | 290.1 | 265 | 373.6 | 219.2 | 205.5 | 250.1 | 279.2 |
| 227 | 96.8 | 1403.6 | 588.9 | 742.9 | 1379 | 767.3 | 484.7 | 435.2 |
| 228 | 744.1 | 1944.7 | 680.2 | 365.7 | 418 | 1097.5 | 375 | 675.9 |
| 229 | 192.8 | 268 | 148.6 | 179.1 | 300.2 | 245.5 | 147 | 234.8 |
| 230 | 587.1 | 143.8 | 108 | 519.8 | 327.3 | 137.2 | 90.6 | 168.9 |
| 231 | 159.4 | 112.3 | 101.9 | 123.3 | 147.3 | 95.5 | 310.1 | 105.2 |
| 232 | 86 | 1502.8 | 1501.4 | 235.4 | 15668.2 | 38.8 | 605.2 | 4886.3 |
| 233 | 813.8 | 1781.7 | 6349.7 | 5834.7 | 8518.5 | 4215.2 | 3924.8 | 4770.7 |
| 235 | 19.1 | 393.8 | 248.5 | 975.6 | 1843.2 | 72.6 | 302.8 | 584.4 |
| 236 | 135.6 | 172.6 | 172 | 178.6 | 303.1 | 218.4 | 107.7 | 240.4 |
| 237 | 1106.1 | 1789 | 2038.4 | 1890.3 | 2100.8 | 1798.9 | 1370.4 | 1717.2 |
| 238 | 366.2 | 375.6 | 1127.2 | 1261.7 | 1343.5 | 899.5 | 859 | 1414.4 |
| 239 | 61.2 | 182.2 | 230.2 | 474.9 | 731.7 | 98.3 | 176.9 | 251.2 |
| 240 | 91.7 | 193.4 | 362.9 | 596.3 | 923.8 | 202.3 | 144.4 | 289.6 |
| 241 | 26.6 | 324.2 | 559.9 | 1218.5 | 1761.7 | 170.8 | 321.8 | 584.8 |
| 242 | 4172.9 | 1891.1 | 1654.2 | 11791 | 2788.1 | 2452.4 | 1809.2 | 1758.5 |
| 243 | 248.1 | 152.6 | 323.5 | 711.2 | 510.7 | 217.7 | 135.2 | 244.7 |
| 244 | 68.8 | 98.9 | 183.4 | 204.9 | 179.5 | 139.4 | 209.7 | 132.7 |
| 246 | 385.3 | 80.7 | 187.9 | 227.3 | 218.7 | 122.1 | 230.3 | 250.4 |
| 247 | 115.2 | 187.8 | 109.8 | 134.8 | 162.4 | 139.5 | 154.3 | 176.4 |
| 248 | 175.8 | 124.7 | 211.6 | 157.6 | 122.1 | 213.7 | 119.3 | 151 |
| 249 | 78.8 | 1316.1 | 1303.2 | 1406.5 | 646.5 | 1094 | 89.7 | 316.7 |
| 251 | 41.9 | 62.5 | 102.3 | 171.4 | 129 | 87.1 | 73 | 44.9 |
| 253 | 297.4 | 222.6 | 147.6 | 339.3 | 377.1 | 276.6 | 218.4 | 296.8 |
| 254 | 170 | 132 | 351.7 | 258.6 | 501.3 | 45.2 | 529.9 | 460.2 |
| 255 | 1140 | 47 | 85.6 | 207.2 | 108 | 89.8 | 121.1 | 51.6 |
| 256 | 509.5 | 559.2 | 396.4 | 6461.4 | 596.9 | 143.8 | 1128.1 | 72.8 |
| 257 | 111.3 | 113 | 208.1 | 145.8 | 103.3 | 155.1 | 204.9 | 122 |
| 258 | 373.9 | 20.9 | 71.2 | 831.4 | 206.8 | 7.3 | 19.2 | 134.7 |
| 259 | 1.2 | 346.7 | 153.9 | 329.1 | 1431.2 | 189.1 | 51.2 | 376.3 |
| 260 | 269.3 | 188.5 | 157.8 | 133.8 | 179.4 | 168.2 | 152.1 | 211.1 |
| 261 | 363.1 | 886.3 | 408.2 | 266.3 | 337.5 | 580.5 | 238.9 | 222.6 |
| 263 | 350.7 | 311.2 | 391.8 | 381.3 | 340.2 | 408 | 301.8 | 534.9 |
| 263 | 560.3 | 220 | 122.6 | 491.3 | 334.4 | 187.2 | 129.9 | 227 |
| 265 | 305.3 | 771.9 | 487.2 | 449.1 | 359.5 | 453.8 | 572.3 | 448.6 |
| 266 | 587.1 | 510.1 | 304.8 | 271.5 | 354.2 | 346.8 | 203.3 | 606.6 |
| 256 | 110.1 | 118.2 | 141.4 | 183.8 | 193.4 | 156.1 | 104.6 | 141.6 |
| 268 | 829.5 | 440.5 | 993.8 | 821.4 | 1312.7 | 938.4 | 407.2 | 1476.7 |
| 269 | 58.4 | 43.6 | 32.7 | 52.3 | 48.9 | 47.7 | 35.4 | 31.4 |
| 270 | 414.3 | 315 | 208 | 162.5 | 188.1 | 275.9 | 132.5 | 378.4 |
| 271 | 184.7 | 216.5 | 242.4 | 350 | 268.7 | 323.9 | 246.1 | 211.3 |
| 272 | 673.6 | 752.9 | 549.8 | 450 | 534.1 | 526.4 | 507.2 | 463.9 |
| 273 | 667.9 | 4430.8 | 2398.6 | 2278.9 | 2835.2 | 5763.4 | 3170.9 | 10524 |
| 274 | 309.4 | 563.1 | 382 | 416.7 | 1158.9 | 634.4 | 198.9 | 501.8 |
| 275 | 150.9 | 343.1 | 349.7 | 862.7 | 617.9 | 370.3 | 217.2 | 282.6 |
| 276 | 144.2 | 2577.7 | 914.9 | 1262.7 | 2706.1 | 873.2 | 822.4 | 731.1 |
| 277 | 221 | 264.6 | 204.6 | 186.4 | 182 | 199.3 | 212.4 | 205.9 |
| 278 | 5.1 | 445.5 | 286.4 | 951.3 | 2040.1 | 322.7 | 97.9 | 556.9 |
| 279 | 1964.2 | 1929.5 | 1874.1 | 1425.7 | 2873.1 | 2411.1 | 2753 | 4215.2 |
| 280 | 1725.8 | 1807.2 | 1790 | 2026.6 | 3105.8 | 3426.9 | 3401.6 | 4521.1 |
| 281 | 299.6 | 10.6 | 61.7 | 159.3 | 165.8 | 22.7 | 10.9 | 56.8 |
| 282 | 253.1 | 287.7 | 240.7 | 553.9 | 252 | 245.3 | 295.4 | 310.6 |
| 283 | 451.8 | 310.2 | 223.6 | 224.6 | 261.3 | 262.4 | 300.3 | 265.8 |
| 284 | 107.2 | 65 | 79.3 | 94.4 | 77.1 | 95.2 | 88.3 | 68.2 |
| 285 | 126.9 | 108.2 | 89.2 | 90.8 | 95.7 | 83.3 | 101.1 | 56.8 |
| 286 | 207.5 | 742.2 | 937.4 | 1260.1 | 840.3 | 441.7 | 1221.8 | 518 |
| 287 | 147.3 | 167.1 | 130.2 | 109.1 | 90 | 112.1 | 102.3 | 113 |
| 288 | 171.6 | 203.3 | 136.7 | 135.2 | 166.9 | 154.6 | 140.7 | 158 |
| 289 | 371.3 | 670.5 | 83.5 | 1902.3 | 2036.5 | 48 | 228 | 264.6 |
| 291 | 80.2 | 126.4 | 72.5 | 78.8 | 132.2 | 210.1 | 63.6 | 112.7 |
| 292 | 38.1 | 110.7 | 46.9 | 472.6 | 1250.2 | 27.4 | 126.2 | 66.3 |
| 293 | 222.5 | 84 | 110.2 | 187.1 | 124 | 59.9 | 126.5 | 88.8 |
| 295 | 1213.6 | 281.8 | 785.8 | 379.3 | 174.4 | 535.7 | 147 | 292.6 |
| 296 | 898.3 | 582 | 827.5 | 972.1 | 1280.1 | 738.6 | 1194.8 | 908.9 |
| 297 | 58.4 | 68.5 | 79.3 | 128 | 150.2 | 55.4 | 43.3 | 58.5 |
| 298 | 389.2 | 195.7 | 352.2 | 318 | 292.9 | 275.4 | 295.4 | 345.4 |
| 299 | 1008.9 | 952.4 | 435.5 | 935.9 | 1207.2 | 1276.8 | 1004.8 | 874.4 |
| 300 | 616.3 | 416.1 | 93.2 | 235.8 | 253 | 285.2 | 321.8 | 218.3 |
| 301 | 787.4 | 7692.9 | 760.9 | 597.6 | 582 | 4161.5 | 866.6 | 1551.4 |
| 302 | 8.2 | 20.2 | 20.5 | 26.4 | 38.3 | 11.5 | 48.2 | 19.3 |
| 303 | 667.1 | 584.1 | 822.2 | 624 | 674.3 | 794.9 | 891.8 | 698 |
| 304 | 184.1 | 237.5 | 283.8 | 497 | 280.3 | 200.5 | 163.9 | 170.7 |
| 305 | 158.6 | 187.4 | 179.4 | 240.3 | 128.9 | 137.5 | 171.4 | 144 |
| 306 | 177.6 | 272.7 | 152.9 | 164.2 | 148.6 | 151.8 | 118.4 | 196.2 |
| 307 | 232.6 | 294 | 179.7 | 177.7 | 166.7 | 143.1 | 269.6 | 156.1 |
| 308 | 3916.9 | 1024.8 | 1901.6 | 978.1 | 2018.2 | 1367 | 1084.7 | 2030.4 |
| 310 | 840.8 | 1027 | 434.4 | 345.5 | 351.7 | 775.7 | 403.9 | 604 |
| 311 | 1.4 | 100.4 | 111.4 | 207.4 | 110.6 | 112.7 | 85.5 | 48.2 |
| 312 | 3441.6 | 2815.6 | 597.5 | 664 | 496.5 | 1479.8 | 176.1 | 1442.5 |
| 313 | 100.5 | 123.2 | 112.4 | 128.1 | 112.7 | 146.2 | 83.4 | 132.5 |
| 314 | 271.3 | 291.9 | 302.3 | 543.9 | 514 | 181.8 | 157.4 | 408.4 |
| 315 | 194.3 | 265 | 553.7 | 442.1 | 676.9 | 352.4 | 338.1 | 580.4 |
| 316 | 190.3 | 130.5 | 393.5 | 448.9 | 461.5 | 184.7 | 184 | 326.6 |
| 317 | 187.8 | 207.7 | 143.5 | 1020.4 | 167.2 | 168.1 | 180.4 | 189.7 |
| 318 | 41.3 | 18.4 | 63.6 | 115.2 | 161.2 | 34.4 | 15 | 117.9 |
| 319 | 860 | 151.7 | 173.4 | 206.1 | 185.7 | 184.2 | 193 | 172.4 |
| 320 | 509.6 | 854.4 | 499.3 | 516.6 | 643.1 | 697.6 | 512 | 842.6 |
| 321 | 856.4 | 633.2 | 596.3 | 403.9 | 477.8 | 545.6 | 282.5 | 377.9 |
| 322 | 433.2 | 202.4 | 278.6 | 249.3 | 234 | 227.3 | 234.3 | 199.3 |
| 323 | 841.5 | 2787.9 | 2937.2 | 1793.4 | 1324.1 | 4240.9 | 2486 | 2525.8 |
| 324 | 34.6 | 20.8 | 38.8 | 166.5 | 195.2 | 110.1 | 85.5 | 75.9 |
| 325 | 493.2 | 226.8 | 266.8 | 301.9 | 256.4 | 292.2 | 312.9 | 251.6 |
| 326 | 107.7 | 1500 | 4118.2 | 5094.1 | 4992.3 | 1863.8 | 3521.7 | 2850 |
| 327 | 8.4 | 1.2 | 6.1 | 58.1 | 53.1 | 10.1 | 1.1 | 19.4 |
| 328 | 448.4 | 1313.7 | 690.6 | 383.9 | 558.3 | 678.1 | 451.7 | 643.7 |
| 329 | 242.5 | 67.9 | 67.9 | 52 | 61.7 | 53.9 | 71.2 | 50.2 |
| 330 | 17.8 | 47.2 | 39.7 | 282.1 | 70.4 | 42.8 | 119.6 | 47.7 |
| 331 | 733.3 | 495.8 | 278.9 | 232 | 273.6 | 280.6 | 257 | 242.5 |
| 333 | 302.3 | 1043.4 | 1067 | 536.5 | 739.2 | 789 | 589.6 | 857.9 |
| 334 | 135 | 171 | 185.4 | 142.8 | 175.4 | 125.4 | 150.7 | 191.2 |
| 335 | 114.3 | 112 | 135.6 | 198.2 | 140.2 | 65.3 | 82.4 | 146.1 |
| 336 | 273.5 | 427.6 | 549 | 929.9 | 527.7 | 486.6 | 685.7 | 484.4 |
| 337 | 127.6 | 450.5 | 304.7 | 308.8 | 228.9 | 259.2 | 192 | 337.1 |
| 338 | 122 | 131.1 | 153.1 | 314.9 | 206.1 | 109.7 | 203.8 | 162.9 |
| 339 | 589.7 | 576.7 | 629.8 | 367.4 | 474.8 | 496.3 | 533.8 | 528.2 |
| 340 | 345.7 | 362 | 289.7 | 277.4 | 243.4 | 291.8 | 246.1 | 272.2 |
| 341 | 601 | 1030.1 | 896.3 | 495.4 | 536.5 | 1091.4 | 1222.4 | 1064.8 |
| 343 | 4100.7 | 199.4 | 431 | 1240.1 | 83 | 30.4 | 75.2 | 123.1 |
| 344 | 1624.5 | 2249.2 | 1044.5 | 1143.8 | 1222.6 | 1571.5 | 1112.9 | 1923.9 |
| 345 | 238.1 | 412.6 | 253.9 | 217.5 | 231.2 | 189.6 | 247.2 | 211.3 |
| 347 | 2041.8 | 1350.1 | 3062.9 | 2896.2 | 3974.1 | 2601.7 | 1109.2 | 3899.9 |
| 348 | 2985.8 | 3296.8 | 7137.1 | 7441.2 | 9015.9 | 4507.6 | 2225.5 | 6141.5 |
| 349 | 242.2 | 171.3 | 270.3 | 274.6 | 214.3 | 206.7 | 232 | 284.3 |
| 350 | 145.3 | 165.3 | 253.4 | 465.2 | 473.9 | 247 | 260.1 | 349.3 |
| 351 | 221.5 | 71.2 | 134 | 484.9 | 440.9 | 92.2 | 237.3 | 182.5 |
| 352 | 302.8 | 377.2 | 355.1 | 306.4 | 343.9 | 332.8 | 471.2 | 707.4 |
| 353 | 485.1 | 155.6 | 246.1 | 298.4 | 282.3 | 160.5 | 283 | 245.4 |

3i

| SEQ ID NO: | 923TT | 924TT | 925TT | 926TT | 927TT | 928TT | 932TT | 933TT |
|---|---|---|---|---|---|---|---|---|
| 354 | 4999.2 | 948.9 | 8.5 | 8107.3 | 357.6 | 741.1 | 2903.8 | 582.1 |
| 355 | 1542.9 | 255.1 | 105.5 | 4694.4 | 98.3 | 91.6 | 1287.2 | 466 |
| 356 | 955.2 | 717.8 | 1055 | 1279.5 | 479.1 | 524.8 | 624.3 | 654.8 |
| 357 | 742.1 | 866.6 | 793.6 | 981.1 | 533.1 | 757.7 | 765.3 | 734.4 |
| 358 | 619.2 | 1731.9 | 778.3 | 770.2 | 675 | 559.4 | 2309.3 | 1072.7 |
| 359 | 393.4 | 300.3 | 283.4 | 311.1 | 437.6 | 326 | 298.3 | 314.7 |
| 362 | 382.2 | 940.4 | 368.8 | 968.1 | 747.1 | 473.3 | 3226.3 | 666.7 |
| 360 | 305.2 | 656.7 | 364.5 | 362.7 | 233.2 | 217.2 | 638.3 | 448 |
| 361 | 455.4 | 543 | 660.9 | 437.4 | 376.4 | 1699.9 | 116.7 | 462.7 |
| 363 | 425.6 | 414.8 | 478.3 | 461 | 574.2 | 432.5 | 334.7 | 437.1 |
| 1 | 730.2 | 1032.9 | 682 | 844.1 | 393.9 | 674.5 | 1344.9 | 1001.2 |
| 2 | 3449 | 1961.4 | 3686.9 | 2642.7 | 1807.9 | 3449 | 6464 | 2719.4 |
| 7 | 354 | 463.2 | 545 | 364.5 | 928.7 | 902.8 | 291.2 | 1104.3 |
| 8 | 2391.2 | 881.8 | 994.1 | 2512.8 | 1239.1 | 1078.9 | 1105.4 | 1030.3 |
| 9 | 7066.7 | 3621.1 | 8955.9 | 10216 | 6146 | 1554.6 | 3073.1 | 2224.4 |
| 10 | 76.1 | 133.7 | 48.5 | 112.3 | 70.9 | 40.5 | 125.8 | 84.2 |
| 11 | 423.1 | 502.3 | 256.7 | 620.1 | 215.5 | 224.5 | 1442.7 | 450.7 |
| 13 | 208.3 | 631.4 | 132.2 | 270.3 | 127.5 | 202.1 | 244.8 | 524.1 |
| 14 | 1772 | 3284.9 | 595.1 | 1382.8 | 378.2 | 703.9 | 1281.9 | 1396.6 |
| 15 | 273.3 | 253.1 | 691.6 | 629.7 | 624.5 | 137.9 | 1375.3 | 988.3 |
| 16 | 1155.7 | 1826.6 | 1298.2 | 1503.2 | 766.7 | 976.8 | 2803.3 | 1587.5 |
| 17 | 981 | 1525 | 1084 | 1110.8 | 713.8 | 1879.1 | 2006.1 | 958.6 |
| 19 | 295.3 | 325.4 | 2332.9 | 154.5 | 766.2 | 143 | 5450.6 | 1516 |
| 20 | 5.6 | 231.8 | 1.1 | 406.2 | 93 | 7.7 | 717.2 | 285 |
| 21 | 216.9 | 1426.9 | 466.2 | 1058.3 | 233.1 | 89.3 | 2805.3 | 820.1 |
| 22 | 5541.1 | 5019.9 | 7633.3 | 7736.7 | 4422.4 | 4997.7 | 6683.9 | 5281.2 |
| 23 | 418.4 | 128.7 | 924.7 | 522.4 | 263.1 | 95.8 | 1540.6 | 1482.2 |
| 24 | 124.7 | 262.2 | 466.7 | 332.9 | 277.9 | 112.7 | 502.5 | 370 |
| 26 | 2003.6 | 326.4 | 9052 | 447.2 | 1915.3 | 199.6 | 1793.9 | 5637.4 |
| 27 | 903.7 | 1325.6 | 731.2 | 620.3 | 523.4 | 499.5 | 1436.8 | 1142.6 |
| 29 | 77.9 | 153.4 | 131.3 | 265.8 | 339.2 | 91 | 278.2 | 113.3 |
| 30 | 244.5 | 111.3 | 342.6 | 1082.1 | 219.4 | 136 | 880.6 | 493.2 |
| 31 | 717.2 | 5693.4 | 185.8 | 2809.1 | 627.1 | 214.1 | 13720.9 | 4115 |
| 33 | 942.9 | 1061.8 | 704.6 | 3949.8 | 244.3 | 466.4 | 5262.7 | 2453.2 |
| 34 | 3136.1 | 702.3 | 4502.9 | 3384.3 | 2498.9 | 1817.4 | 204.4 | 1637.3 |
| 35 | 823.2 | 709.6 | 179 | 1649.8 | 528.8 | 173.2 | 2586.2 | 722.3 |
| 36 | 196 | 1335.4 | 173.1 | 183.3 | 431.8 | 189.1 | 339.1 | 986.2 |
| 37 | 190.3 | 178.3 | 281.4 | 264.8 | 256.3 | 166 | 142.8 | 210.3 |
| 38 | 764.6 | 1248.7 | 543.5 | 2191.9 | 232.8 | 763.6 | 2898.9 | 1375.1 |
| 40 | 454.8 | 644.3 | 481.5 | 529.5 | 897.3 | 467 | 541 | 618.6 |
| 41 | 324.4 | 539.9 | 467.9 | 199.6 | 143.9 | 2803.9 | 331.2 | 668.8 |
| 42 | 245.1 | 482.5 | 178 | 170.4 | 246.6 | 572.5 | 528.4 | 345.2 |
| 43 | 312.4 | 237 | 363 | 359 | 522.3 | 337.5 | 229 | 305.9 |
| 44 | 485.5 | 1587.5 | 666.9 | 778.7 | 788.5 | 427.7 | 1308.4 | 1173.2 |
| 45 | 523.4 | 1739.2 | 564.2 | 954.7 | 723.9 | 426.5 | 1423.9 | 1045.9 |
| 46 | 219.6 | 289.5 | 291.3 | 270.7 | 363.6 | 297.2 | 236.2 | 308.8 |
| 47 | 358.3 | 1203.3 | 261.6 | 420.8 | 219.8 | 231.9 | 811 | 565.7 |
| 48 | 132.2 | 32.9 | 529.4 | 17.2 | 481.9 | 15 | 768.8 | 1447.3 |
| 49 | 502.3 | 3238.8 | 380.6 | 5448 | 761.8 | 211.7 | 13066 | 3743 |
| 50 | 203.5 | 179.7 | 458.7 | 481.9 | 247 | 130.4 | 1359.3 | 491.3 |
| 51 | 36.1 | 495.5 | 36.6 | 477.9 | 354.1 | 190.1 | 860.5 | 367.9 |
| 52 | 217.6 | 305.8 | 203.1 | 178.1 | 145.5 | 199.2 | 266.4 | 254.3 |
| 53 | 135.2 | 1943.2 | 130.6 | 584.4 | 98 | 144.2 | 2628.1 | 714.3 |
| 54 | 980.6 | 1795 | 433.4 | 795.1 | 591.6 | 1643.8 | 1486.9 | 1394.9 |
| 55 | 106.3 | 85.4 | 98.8 | 76.5 | 97.2 | 90.8 | 86.4 | 81.5 |
| 56 | 72.3 | 168.2 | 54.5 | 77.8 | 70.1 | 175.9 | 120.4 | 338.8 |
| 57 | 4530.2 | 5218.3 | 281.2 | 4508.1 | 1636.4 | 1547.5 | 4191.4 | 4170.2 |
| 58 | 8556.8 | 6205.1 | 264.9 | 5634.2 | 1765.7 | 2033.7 | 8482.4 | 4433.9 |
| 59 | 1700.3 | 4628.3 | 2056.3 | 1693.4 | 800.8 | 1336.9 | 5450.1 | 2540.6 |
| 60 | 185.2 | 235.6 | 229.2 | 272.6 | 145.4 | 296.3 | 224.9 | 319 |
| 61 | 115.2 | 98.8 | 149 | 130.4 | 193.6 | 134.3 | 90.8 | 139.6 |
| 62 | 3145.7 | 4454.6 | 2756.3 | 2855 | 5821 | 142.2 | 5129.2 | 2442.2 |
| 63 | 379.2 | 744.4 | 325.8 | 938.2 | 356.1 | 502 | 1395.4 | 539.9 |
| 64 | 238.6 | 3544.9 | 113.1 | 512.4 | 242.4 | 124.5 | 661.9 | 573.5 |
| 65 | 113.4 | 390.1 | 172.8 | 433.7 | 95.5 | 201.5 | 506.6 | 282.3 |
| 66 | 712.9 | 1199.2 | 529.5 | 816.9 | 392.7 | 1636.5 | 1229.2 | 1158.8 |
| 67 | 29201.1 | 24240.4 | 35951.3 | 30300.5 | 39570.8 | 34590.3 | 12924.3 | 33523.7 |
| 68 | 369.9 | 258.4 | 3692.3 | 955.1 | 3718.5 | 2125.3 | 13.8 | 2527.3 |
| 69 | 1786.8 | 1413.7 | 5838.9 | 2685.9 | 9047.2 | 4524.2 | 193.4 | 5503.7 |
| 70 | 1299.1 | 4941.4 | 1670.8 | 1399.3 | 4204.2 | 2761.2 | 1891.3 | 3217.7 |
| 71 | 319.8 | 3969.9 | 1361.7 | 304 | 214.9 | 196.2 | 7882.8 | 2439.7 |
| 72 | 858.1 | 2076.7 | 424 | 1838.1 | 291.2 | 256.6 | 4680.6 | 1518.6 |
| 73 | 330.7 | 633.1 | 342.2 | 295.9 | 422.6 | 202.3 | 561.1 | 512.8 |
| 75 | 160.9 | 1925.8 | 332.6 | 236.1 | 224.7 | 510.6 | 2680.7 | 1504.4 |
| 76 | 186.2 | 576.1 | 105.9 | 163.7 | 609.8 | 358.6 | 809.9 | 826.1 |
| 77 | 3237.7 | 1390.9 | 5841.2 | 3756.2 | 8578.9 | 3419.8 | 278.9 | 3072.7 |
| 78 | 390.6 | 630.4 | 1085.3 | 608.2 | 792.8 | 957.2 | 640.8 | 631.7 |
| 79 | 149 | 230.2 | 167.8 | 234.3 | 145.3 | 153.8 | 436.8 | 205.9 |
| 80 | 335 | 1124.8 | 139.3 | 306 | 338 | 751.9 | 1832.2 | 582.1 |
| 81 | 756.3 | 1099.9 | 314 | 2079.9 | 1185.6 | 169.3 | 5642.3 | 1783.2 |
| 82 | 204.4 | 219.8 | 346.6 | 218.1 | 417.4 | 382.9 | 97.4 | 242.2 |
| 84 | 161.4 | 305.1 | 329.2 | 121.2 | 177.5 | 155.6 | 567.2 | 276 |
| 85 | 268.5 | 148.9 | 131.5 | 9338.9 | 157.7 | 130.4 | 841 | 209.5 |
| 86 | 63.7 | 60.1 | 90.7 | 94.7 | 77.3 | 63.7 | 128.2 | 210.3 |
| 87 | 336.8 | 563.4 | 358.3 | 784 | 227.4 | 345.8 | 6260.3 | 351.1 |
| 88 | 2065.9 | 1415.1 | 5272.5 | 2763 | 4806.2 | 6097.4 | 444.1 | 3528.8 |
| 89 | 170 | 217.9 | 167.4 | 265.8 | 193.2 | 219.7 | 218.7 | 301.1 |
| 90 | 125.6 | 103.3 | 107.3 | 195.6 | 166.8 | 106.5 | 188.5 | 236.2 |
| 91 | 14152.6 | 4927.9 | 66.9 | 6763.6 | 1057.9 | 1430.5 | 7192.3 | 2761 |
| 92 | 4155.7 | 9975.4 | 3017.4 | 2430.3 | 1461.8 | 5499.5 | 10750.2 | 6764.7 |
| 93 | 253.7 | 200.3 | 376.1 | 458.2 | 173.2 | 390.5 | 123.5 | 213.3 |
| 94 | 2143.2 | 1723 | 1215.4 | 1528.1 | 389.5 | 566.5 | 1579.9 | 1152.9 |
| 95 | 493.2 | 509.2 | 582.1 | 343.1 | 199.5 | 575.4 | 147.5 | 827.4 |
| 96 | 154 | 286.2 | 193.1 | 193.6 | 157.8 | 242.7 | 283.8 | 221.5 |
| 97 | 289.4 | 1005.4 | 259.4 | 282.6 | 167.4 | 291 | 674.7 | 490.2 |
| 98 | 16.8 | 18.8 | 39.8 | 36.2 | 26.9 | 32.4 | 20.3 | 129.5 |
| 99 | 254.8 | 406.1 | 225.7 | 255.7 | 266 | 219.6 | 745 | 306.1 |
| 100 | 12961.3 | 633.2 | 23136.5 | 13157.8 | 4258.2 | 18457 | 92.1 | 9157.9 |
| 101 | 199.2 | 366.4 | 205.1 | 247.6 | 410.2 | 348.6 | 240.2 | 460.8 |
| 102 | 169.7 | 159.1 | 125.6 | 126.2 | 215.3 | 150.2 | 91.5 | 222 |
| 103 | 283.5 | 423.8 | 297.5 | 295.3 | 439.2 | 325.4 | 387.5 | 411.3 |
| 104 | 480.4 | 470.1 | 825.8 | 374.7 | 462.5 | 333.1 | 196.7 | 465.7 |
| 105 | 619.1 | 605.5 | 855.3 | 445.7 | 366.9 | 360.7 | 367.7 | 428.9 |
| 106 | 431 | 505.5 | 776.2 | 415.5 | 433 | 341.7 | 213.9 | 403.2 |
| 107 | 543.7 | 258.5 | 162.4 | 1100.5 | 444.6 | 341 | 846.1 | 327.4 |
| 108 | 369.2 | 171.8 | 356.8 | 273.4 | 382.3 | 416.2 | 184.3 | 269.6 |
| 109 | 2753.8 | 628.9 | 228.3 | 4738.3 | 100.4 | 1962.4 | 446.6 | 1981.7 |
| 110 | 4958.7 | 1350.1 | 414.3 | 7933.5 | 114.9 | 2744.5 | 1064.5 | 3917.5 |
| 111 | 1702 | 404.9 | 1150.9 | 1477.8 | 1041.7 | 814.8 | 162.5 | 988.1 |
| 112 | 1008.4 | 1893 | 534.7 | 114 | 706.3 | 402.2 | 1536.4 | 1239.5 |
| 113 | 151.5 | 782 | 135.7 | 174.6 | 265.6 | 218.3 | 1021.9 | 721.6 |
| 114 | 530.5 | 317.9 | 811.7 | 453.1 | 335.8 | 512.2 | 419.4 | 481.1 |
| 115 | 303.3 | 874.1 | 578.9 | 468.1 | 458.5 | 324.9 | 1401.9 | 823.6 |
| 116 | 268 | 457.4 | 242.4 | 317.8 | 206.9 | 239.4 | 1630.2 | 331.4 |
| 117 | 2483.3 | 467.5 | 3516.8 | 1446.4 | 1615.1 | 4189.5 | 228.4 | 1398 |
| 118 | 165.1 | 112 | 513.5 | 378.2 | 458.6 | 641.7 | 191.7 | 241.8 |
| 119 | 231.3 | 494.5 | 171.7 | 189.4 | 195.2 | 333.6 | 346.5 | 301.3 |
| 120 | 87.4 | 99.3 | 267.3 | 72.4 | 98.9 | 75.7 | 52 | 227.3 |
| 121 | 967.4 | 3533.9 | 789.3 | 1797 | 301.9 | 588.6 | 4329.5 | 1463.8 |
| 122 | 139.2 | 473.8 | 265.9 | 361.2 | 315 | 76.3 | 341.7 | 238.2 |
| 123 | 119.5 | 215.8 | 183.1 | 128.8 | 119.8 | 265.2 | 182.7 | 263.7 |
| 124 | 109.4 | 166.6 | 139.1 | 148.2 | 604.8 | 130.2 | 108.7 | 169.3 |
| 125 | 722.7 | 763.1 | 1037.4 | 1010.3 | 1402.8 | 848.6 | 637.5 | 908.8 |
| 126 | 1296.7 | 159.8 | 1627.8 | 874.6 | 884.3 | 818.1 | 110.9 | 767.8 |
| 127 | 104.8 | 194.8 | 105 | 95.2 | 146.2 | 98.1 | 305.7 | 145.8 |
| 128 | 224.9 | 308 | 285.9 | 277.2 | 363.9 | 241.5 | 136.6 | 243.7 |
| 129 | 545.4 | 2482.1 | 213.2 | 2357.2 | 237.7 | 1139.4 | 5618.8 | 1929.5 |
| 130 | 76.7 | 408.1 | 75.2 | 90.5 | 165.7 | 222.2 | 490.8 | 419.5 |
| 131 | 85.8 | 1368.9 | 53.3 | 125.2 | 103.8 | 83.8 | 726.3 | 483.3 |
| 132 | 172.5 | 245.6 | 197.9 | 213 | 230.3 | 179.6 | 212.1 | 210.3 |
| 133 | 146.7 | 108.3 | 66.2 | 57.7 | 106.6 | 66.4 | 177.9 | 79.6 |
| 134 | 143.3 | 290.6 | 125.8 | 87.5 | 146 | 152.7 | 489.7 | 203.5 |
| 135 | 483 | 571.2 | 802.1 | 590.4 | 416.8 | 293.2 | 388.6 | 465.7 |
| 138 | 139.2 | 119.6 | 184.4 | 178 | 169.6 | 75.2 | 370.9 | 179.5 |
| 139 | 121.1 | 452.7 | 115.4 | 122.7 | 113.3 | 162.6 | 239 | 194 |
| 140 | 4146.1 | 1876 | 1951.6 | 1338.3 | 211.9 | 1.2 | 179.7 | 833.9 |
| 141 | 1804.4 | 1208.1 | 1688 | 1567 | 2363.3 | 1017 | 699.3 | 1291.8 |
| 144 | 380.1 | 9550.3 | 459.6 | 472.6 | 561 | 7295.8 | 9513.3 | 10388.7 |
| 145 | 194.4 | 2091 | 162.4 | 172 | 259.9 | 188.3 | 229 | 274.5 |
| 146 | 205.4 | 202 | 199.5 | 239.1 | 259 | 184.3 | 149.4 | 241.4 |
| 147 | 52 | 107.5 | 75.7 | 55.9 | 66.3 | 46.2 | 53.6 | 102.4 |
| 148 | 718.7 | 437 | 450.1 | 1743.3 | 388 | 408.3 | 1716 | 259.8 |
| 149 | 513.6 | 418 | 556.5 | 723.8 | 170.1 | 284.3 | 345.2 | 370.6 |
| 150 | 340.8 | 469.1 | 189.2 | 647.8 | 337.7 | 133.8 | 357.6 | 199.7 |
| 151 | 378.3 | 501.3 | 350.8 | 284.8 | 186.5 | 295.1 | 1725 | 566.4 |
| 153 | 135.8 | 159.4 | 124.9 | 120.8 | 128.2 | 109.1 | 403.4 | 1078.5 |
| 154 | 315.7 | 3650.2 | 708.6 | 1687.8 | 203.3 | 594.7 | 7527.9 | 3225.5 |
| 155 | 173.6 | 320.6 | 127.8 | 180.3 | 169.7 | 101.4 | 200.9 | 264.6 |
| 156 | 45 | 254 | 61.8 | 80.7 | 117.5 | 103.3 | 127.8 | 570.5 |
| 157 | 136.9 | 129.1 | 120.6 | 168.2 | 166.4 | 137.2 | 114.9 | 166.3 |
| 158 | 1.2 | 666.7 | 6.7 | 71.9 | 42.6 | 71.2 | 1801.9 | 533.3 |
| 159 | 1953.4 | 2285.3 | 3885.5 | 2682.2 | 3034.8 | 3946.6 | 1345.5 | 2577.3 |
| 161 | 319.4 | 1302 | 72.9 | 3.4 | 29.5 | 683.5 | 715.7 | 2665.9 |
| 162 | 110.3 | 41 | 257 | 370 | 123.6 | 69.8 | 481.8 | 259.5 |
| 164 | 1671 | 9328.7 | 183.5 | 423.7 | 105.2 | 5095.9 | 2963.9 | 3993.3 |
| 166 | 4942.9 | 5074.8 | 7381.4 | 6040.8 | 6386.6 | 3311.8 | 2123.6 | 2331.2 |
| 167 | 749.2 | 988.4 | 3046.3 | 1523.6 | 2291.6 | 1961.5 | 174.8 | 2118.3 |
| 168 | 751.1 | 1098.9 | 495.4 | 268.2 | 581.5 | 558 | 495.7 | 1402.7 |
| 169 | 7503.7 | 2997.6 | 1624.4 | 7311.5 | 4532.9 | 8835.6 | 8236.4 | 8878.2 |
| 170 | 1092.7 | 3984.7 | 914.4 | 1353.1 | 1072.7 | 3583.1 | 6780.1 | 2356.3 |
| 171 | 1091.9 | 103.2 | 2345.5 | 1683.7 | 1336.1 | 67.4 | 1413.4 | 1527 |
| 172 | 647.2 | 545.2 | 686.6 | 676.8 | 882.2 | 643.6 | 381.4 | 537.6 |
| 173 | 310.1 | 807.9 | 316.1 | 454.7 | 125 | 570.2 | 2254.5 | 686.8 |
| 176 | 352.8 | 3659.5 | 161.7 | 682 | 66.9 | 511.8 | 1820.1 | 1938.3 |
| 177 | 266.4 | 422.7 | 627.2 | 464.7 | 698.3 | 660 | 182.2 | 629.9 |
| 178 | 78.1 | 2301.7 | 104.6 | 251.2 | 360.2 | 1258.1 | 2294.6 | 1651.5 |
| 179 | 128.9 | 1233.1 | 66.2 | 511.4 | 130.9 | 58.8 | 1647.2 | 1137.8 |
| 180 | 105.8 | 710.8 | 107 | 181.6 | 146.8 | 78.7 | 1093 | 420.8 |
| 181 | 9757 | 7620 | 13164.3 | 9078.6 | 11540.2 | 7914.9 | 4064.3 | 8345.1 |
| 182 | 496.8 | 473.5 | 600.9 | 574.6 | 265.4 | 353.5 | 605.3 | 428.7 |
| 183 | 392.6 | 39.9 | 1783.8 | 80.3 | 243.4 | 23.2 | 486.1 | 1115.1 |
| 184 | 259.1 | 22002.2 | 275.3 | 392.4 | 236.8 | 191.2 | 3061.9 | 2469.9 |
| 185 | 1311.7 | 3109.9 | 1695.2 | 2606.4 | 1042.9 | 801.2 | 1663.7 | 6383.1 |
| 186 | 309.2 | 248.2 | 731.9 | 456.2 | 752.1 | 448.3 | 238.7 | 330.6 |
| 187 | 360.2 | 80.5 | 282.7 | 112.1 | 108.2 | 52.7 | 216.2 | 310.5 |
| 188 | 146.5 | 209 | 366.3 | 96.4 | 142.6 | 103.3 | 898.6 | 358.8 |
| 189 | 84.1 | 133.6 | 168.1 | 73.6 | 133 | 48.1 | 304.3 | 209.3 |
| 190 | 66 | 370 | 79.8 | 99.8 | 90.5 | 387.4 | 665.7 | 640.7 |
| 191 | 1054.3 | 1687.1 | 1089.6 | 4008.9 | 457.1 | 1051.3 | 4042.4 | 1869.4 |
| 192 | 101.9 | 78.1 | 134.8 | 200.9 | 179.1 | 65.7 | 775.6 | 145.6 |
| 193 | 815.2 | 514.5 | 1367.9 | 1552.3 | 1059.7 | 2629.4 | 354.5 | 944.3 |
| 194 | 138.2 | 264.9 | 193.5 | 255.5 | 125.4 | 157.6 | 270.8 | 185.4 |
| 195 | 269.8 | 168.4 | 314.1 | 235.5 | 344.1 | 291 | 109.8 | 242.7 |
| 196 | 1835 | 1891 | 3022.5 | 2154.7 | 3025 | 5691.1 | 1224 | 6848.2 |
| 197 | 78 | 67 | 146.6 | 89.4 | 111.8 | 94.4 | 72.1 | 99.4 |
| 198 | 59.7 | 349.1 | 117.3 | 72.4 | 77.7 | 65.9 | 89.4 | 217.4 |
| 199 | 2202.9 | 301.5 | 120.6 | 6209.3 | 190.5 | 91 | 1705.6 | 642.7 |
| 200 | 369.9 | 467.8 | 572.4 | 164.5 | 285 | 358.3 | 533 | 694.8 |
| 201 | 4783.4 | 1093.3 | 42.1 | 7327.6 | 380.1 | 865.7 | 2830.3 | 670.3 |
| 203 | 229.2 | 565.9 | 244.9 | 314.3 | 126.5 | 350.8 | 4025.7 | 1159.8 |
| 204 | 1028.9 | 1353.2 | 742.4 | 630.8 | 467.1 | 794.8 | 1093.2 | 723.2 |
| 205 | 4521.1 | 3738.9 | 6165.2 | 5757.6 | 2714.1 | 3696 | 4479 | 5109.5 |
| 206 | 286.5 | 137.7 | 822.1 | 155.9 | 838.5 | 245.4 | 1616.9 | 203.7 |
| 207 | 1415.9 | 489.1 | 680.7 | 771.5 | 469.4 | 789.4 | 93.7 | 464.5 |
| 208 | 1235.8 | 212.4 | 285.9 | 104.7 | 204.8 | 139.6 | 283.2 | 359.2 |
| 209 | 833.2 | 1350.4 | 3254.1 | 1747.4 | 5771.7 | 1318.9 | 86.5 | 2452.8 |
| 211 | 11370.8 | 683.4 | 10746.5 | 11683.6 | 36602.3 | 14294.3 | 496.2 | 11150.1 |
| 212 | 417.3 | 1679.4 | 495.3 | 397.9 | 1235.8 | 814.5 | 486.7 | 989.5 |
| 213 | 80.3 | 68.5 | 84.3 | 144.4 | 80.3 | 59 | 74.4 | 100.7 |
| 215 | 1765.1 | 754.5 | 1147.4 | 1032.5 | 842.1 | 953 | 108 | 565.1 |
| 216 | 976.1 | 385.3 | 1162.1 | 844.6 | 488.1 | 945.3 | 574.9 | 513.2 |
| 217 | 246.7 | 1309.8 | 268.5 | 563.9 | 267.1 | 1014.6 | 687.1 | 752.5 |
| 218 | 309.8 | 166.4 | 348.5 | 328.9 | 276.7 | 314 | 111.9 | 166.4 |
| 220 | 75.3 | 89.1 | 81.1 | 68.8 | 102.4 | 64.6 | 58.5 | 66.7 |
| 221 | 711.2 | 968.6 | 587.7 | 780.3 | 463.3 | 617.2 | 1979.7 | 1046.5 |
| 223 | 360.9 | 409.7 | 327.9 | 542.2 | 323.6 | 203.4 | 535.9 | 305.2 |
| 227 | 720 | 681.3 | 761.1 | 2095.7 | 501.1 | 532.7 | 2050.6 | 2295.1 |
| 228 | 319.6 | 300.8 | 802.4 | 439.9 | 916.7 | 403.2 | 157.7 | 507 |
| 229 | 228.5 | 277.6 | 251.1 | 185.2 | 164.1 | 200.4 | 180.1 | 258.6 |
| 230 | 277.5 | 1169.1 | 166.3 | 609.9 | 138.4 | 112.4 | 1313.4 | 1176.2 |
| 231 | 146.9 | 281.7 | 111 | 166 | 120.6 | 124.9 | 1309.9 | 513.5 |
| 232 | 1325.8 | 198 | 6317 | 350.3 | 1427 | 140.7 | 1196.8 | 3680.1 |
| 233 | 6765.2 | 7965.7 | 6520.5 | 7610.7 | 2523.6 | 3946.5 | 15970.8 | 5207.9 |
| 235 | 798.9 | 137.6 | 1126.6 | 2196.9 | 740.6 | 73.9 | 877 | 866.4 |
| 236 | 109 | 495.7 | 368.7 | 241.9 | 407.9 | 187.5 | 496.9 | 426 |
| 237 | 1643.3 | 2222.9 | 1846 | 1647.1 | 1467.4 | 1755.2 | 1820.3 | 2097.6 |
| 238 | 1432.8 | 1140.6 | 1085.2 | 1024.6 | 592.9 | 1468.4 | 1314.4 | 1287.1 |
| 239 | 83.3 | 421.5 | 345.8 | 665.5 | 279.4 | 372.4 | 776.5 | 766.3 |
| 240 | 140.9 | 406.6 | 453 | 953.8 | 285.9 | 481.1 | 1780.9 | 951.5 |
| 241 | 234.7 | 932.4 | 931.7 | 1944 | 457.3 | 892.7 | 2797.1 | 2091.7 |
| 242 | 3314 | 21699.6 | 1079.3 | 21653.5 | 3263.3 | 3729.4 | 21913.7 | 24536 |
| 243 | 354 | 246.6 | 412.2 | 1107.5 | 269.7 | 217.5 | 691.3 | 311.1 |
| 244 | 222 | 388.3 | 205 | 223.8 | 105.6 | 325.5 | 474.4 | 399.6 |
| 246 | 472.3 | 1406 | 305.7 | 434.6 | 199.4 | 177.4 | 1088.7 | 901.8 |
| 247 | 92.8 | 98.8 | 151 | 126.2 | 202.2 | 107.4 | 83.4 | 102.1 |
| 248 | 212.2 | 3753.3 | 158.2 | 227.2 | 186.1 | 449.4 | 2480 | 3964.5 |
| 249 | 1409.4 | 1281.8 | 405.1 | 1043 | 649.5 | 1270.8 | 1958 | 1894.7 |
| 251 | 99.7 | 776.5 | 96.3 | 222.9 | 77.6 | 219.8 | 1995.8 | 859.5 |
| 253 | 275 | 293.5 | 302.1 | 128.1 | 252.8 | 311 | 316.4 | 291.9 |
| 254 | 695.9 | 1525.8 | 629.1 | 370.5 | 121.7 | 2570 | 1228.6 | 1090.4 |
| 255 | 60.9 | 2489.7 | 89.7 | 245.4 | 289 | 1251.3 | 2613.6 | 1698.6 |
| 256 | 12009.8 | 3823 | 76.1 | 6109 | 998.6 | 1154.1 | 6963.6 | 1470.4 |
| 257 | 181.8 | 218.1 | 208 | 382.8 | 124.9 | 107 | 369.9 | 216.5 |
| 258 | 864.1 | 663.9 | 212.2 | 1288.3 | 130 | 47.2 | 2891.5 | 350.9 |
| 259 | 235.3 | 658.4 | 1209.1 | 373.2 | 212.5 | 143.5 | 1662.8 | 1191.8 |
| 260 | 151.4 | 161.7 | 168.5 | 138.6 | 240.5 | 128.7 | 127.1 | 189.1 |
| 261 | 200.6 | 567.6 | 409.5 | 332.1 | 282.3 | 256.2 | 194 | 303.8 |
| 263 | 524.9 | 637.2 | 549.3 | 697.3 | 354.8 | 473.9 | 797.2 | 691.2 |
| 263 | 262.8 | 1110.6 | 213 | 541.8 | 164.6 | 154.5 | 1268.5 | 980.9 |
| 265 | 278.9 | 105.6 | 510.8 | 504.8 | 664 | 337.3 | 59.8 | 364 |
| 266 | 414.8 | 163.6 | 326.2 | 220.7 | 601.9 | 433.1 | 158.4 | 283.7 |
| 256 | 126.6 | 169.2 | 102.6 | 129.7 | 138.6 | 131.2 | 232.7 | 376.5 |
| 268 | 455 | 1366.4 | 1736.7 | 757.1 | 890.5 | 1003.2 | 289.5 | 1318 |
| 269 | 29.7 | 103.9 | 37 | 84.9 | 68.8 | 46 | 87.8 | 154.9 |
| 270 | 198.8 | 186.3 | 209.5 | 175.8 | 440 | 234.1 | 176.8 | 287.7 |
| 271 | 239.3 | 1388 | 167.3 | 2027.5 | 279.7 | 256.3 | 3061.5 | 829.7 |
| 272 | 368 | 514.5 | 501.9 | 443.2 | 535.3 | 513.2 | 464.6 | 370.6 |
| 273 | 3575.1 | 1142.1 | 4935.8 | 2965.1 | 4032.3 | 5489.5 | 628.9 | 5515.9 |
| 274 | 369 | 1242.3 | 929 | 638.7 | 910.6 | 393.1 | 3068.9 | 1428 |
| 275 | 331.8 | 1186.4 | 419.7 | 790.1 | 385.7 | 210.6 | 387.1 | 2099.4 |
| 276 | 1037.3 | 821.9 | 994.3 | 2971.4 | 802.9 | 655.6 | 3409.5 | 3911.4 |
| 277 | 154 | 235.3 | 180.6 | 192.9 | 222 | 146.1 | 209.9 | 210.9 |
| 278 | 393.7 | 2185.4 | 1095.9 | 1106.9 | 475.5 | 287.1 | 2762.2 | 1290.3 |
| 279 | 1931.9 | 1574.6 | 2162.6 | 1696.4 | 1482 | 1484.1 | 2472.1 | 2330 |
| 280 | 2954.9 | 2033.6 | 2673.9 | 2531.2 | 1688.4 | 1936.3 | 3691.5 | 2628.7 |
| 281 | 76.5 | 295.7 | 134.9 | 81.7 | 87.5 | 993.9 | 793 | 372.3 |
| 282 | 295.3 | 214.1 | 295 | 3209.3 | 379.2 | 245.1 | 981.6 | 261.1 |
| 283 | 249.5 | 269.5 | 265.3 | 232.1 | 431.8 | 208.7 | 205.3 | 271.7 |
| 284 | 73.5 | 112.2 | 61.9 | 75.7 | 76.4 | 97.7 | 57.1 | 92.7 |
| 285 | 111 | 99.4 | 75.2 | 101.1 | 94.7 | 68.6 | 93.9 | 98 |
| 286 | 629.8 | 52.2 | 799.8 | 1994.7 | 465.5 | 828.9 | 53.1 | 264.8 |
| 287 | 115.5 | 113 | 87.7 | 122.5 | 134.4 | 100.9 | 81.5 | 95.9 |
| 288 | 109.4 | 141.8 | 130.1 | 140.7 | 149.8 | 126.1 | 108.4 | 112.5 |
| 289 | 1666 | 1269.4 | 941.6 | 5416.8 | 893.2 | 209.9 | 5258.5 | 2320.1 |
| 291 | 79.6 | 122.1 | 96 | 292.2 | 114.6 | 97.9 | 167.1 | 160.9 |
| 292 | 226.5 | 5489.8 | 317.3 | 841.6 | 96.1 | 81.2 | 4786.4 | 2366.7 |
| 293 | 173.9 | 986.8 | 92 | 624.7 | 212.3 | 203.9 | 667.1 | 929.4 |
| 295 | 312.6 | 1375.5 | 229.5 | 1024.5 | 598 | 569.3 | 688.5 | 1755 |
| 296 | 1129.7 | 1734.4 | 1277.5 | 815.2 | 602.9 | 561.5 | 2271.7 | 1202.6 |
| 297 | 81.6 | 53.9 | 53.8 | 152.2 | 91.5 | 62.5 | 118.6 | 45.6 |
| 298 | 394.3 | 619.7 | 407.5 | 404.3 | 288.6 | 242.2 | 506.9 | 419.7 |
| 299 | 869.8 | 1276.7 | 1226.2 | 959.5 | 865.1 | 1714.9 | 2366.2 | 1985.2 |
| 300 | 273.3 | 1444.8 | 240.7 | 364.3 | 206.4 | 660 | 1568.7 | 998 |
| 301 | 354.5 | 293.6 | 797 | 439.2 | 5202.8 | 496.9 | 215.5 | 810.2 |
| 302 | 43 | 69.4 | 22.9 | 53.4 | 24.2 | 8.5 | 116.5 | 61.8 |
| 303 | 635.7 | 390 | 1008.6 | 773.9 | 568.9 | 855.4 | 413.7 | 576.5 |
| 304 | 565.4 | 436.2 | 225.3 | 950.6 | 633.7 | 252.3 | 868 | 425.2 |
| 305 | 213.5 | 1945 | 86.7 | 250.1 | 230.8 | 450.4 | 693.3 | 661.4 |
| 306 | 150.6 | 895.3 | 136.6 | 156.5 | 236.5 | 135.1 | 1745.4 | 158.5 |
| 307 | 127.6 | 203.9 | 134.7 | 192.6 | 264.9 | 138.8 | 211.5 | 228.6 |
| 308 | 1248.1 | 607.6 | 1715.7 | 815.5 | 1207.6 | 1667 | 526.5 | 1140.3 |
| 310 | 323.3 | 105.3 | 561.9 | 412.8 | 554.5 | 441.2 | 95.6 | 355.5 |
| 311 | 187.1 | 409 | 134.4 | 246.2 | 66.9 | 232.4 | 864.3 | 176.7 |
| 312 | 215.6 | 35.7 | 964.5 | 512.9 | 1442.3 | 743.1 | 1.2 | 712.1 |
| 313 | 102.1 | 614.8 | 77.9 | 187.7 | 226.5 | 400.1 | 210.6 | 454.4 |
| 314 | 681 | 1706.8 | 671.1 | 751.7 | 185.6 | 303.4 | 684.7 | 792.1 |
| 315 | 211.5 | 216.7 | 421.9 | 234 | 416.7 | 500.7 | 245.9 | 280 |
| 316 | 435.5 | 619.5 | 376.2 | 536.9 | 395.4 | 330.2 | 704.9 | 460.6 |
| 317 | 168.8 | 203.4 | 167.5 | 2721.9 | 212.3 | 142.8 | 142.3 | 295.9 |
| 318 | 129.1 | 300.4 | 132.8 | 150.6 | 54.1 | 39.7 | 1463.9 | 297.9 |
| 319 | 438.9 | 357.5 | 187.5 | 180.3 | 354.2 | 257.4 | 855.9 | 322.5 |
| 320 | 533.7 | 201.6 | 562 | 465.6 | 667.1 | 655.6 | 266.9 | 475.1 |
| 321 | 320.6 | 174.3 | 471.9 | 402.1 | 561.7 | 371.6 | 180.9 | 319.4 |
| 322 | 257.1 | 275.3 | 249 | 193.6 | 264.7 | 232 | 267.4 | 249.9 |
| 323 | 2838.3 | 3740 | 2267.7 | 2105.4 | 2020.1 | 7965.7 | 2455.6 | 6172.4 |
| 324 | 139.6 | 720.8 | 116.1 | 87.9 | 66.3 | 225.9 | 269 | 421.6 |
| 325 | 325.1 | 538.7 | 346.6 | 353 | 241.9 | 342.5 | 547.1 | 466.2 |
| 326 | 6936.9 | 3406 | 3724.5 | 6176 | 2949 | 3655.6 | 1280.4 | 2870.4 |
| 327 | 29.3 | 28.4 | 40.5 | 34.8 | 1.1 | 43.1 | 50.5 | 85.2 |
| 328 | 323.8 | 284.6 | 596.2 | 451.7 | 857.7 | 576.7 | 72.6 | 488.6 |
| 329 | 76 | 83.5 | 69.9 | 71.3 | 81 | 78.7 | 65.1 | 41.9 |
| 330 | 148.3 | 861.9 | 37.4 | 251.5 | 19.5 | 53.5 | 1666.2 | 255.1 |
| 331 | 232.2 | 284.6 | 291.4 | 279.4 | 449.1 | 243.7 | 257.3 | 263.5 |
| 333 | 420 | 491.9 | 777.5 | 589.6 | 728.3 | 591.1 | 250.1 | 419.1 |
| 334 | 179.2 | 509.5 | 135.4 | 165.9 | 136.1 | 152.8 | 170.2 | 551.5 |
| 335 | 109 | 243.2 | 144.4 | 104.1 | 452.1 | 72.9 | 710.8 | 914.6 |
| 336 | 765.5 | 230.7 | 670.7 | 465 | 499.8 | 294.9 | 129.3 | 318.8 |
| 337 | 312.9 | 1159 | 419.7 | 497.2 | 178 | 165.9 | 990.9 | 1049.7 |
| 338 | 577.4 | 617.7 | 185.9 | 401.6 | 177.5 | 251.9 | 956.2 | 491.5 |
| 339 | 392.3 | 332.8 | 470.3 | 340.9 | 615.4 | 377.2 | 170.7 | 322.8 |
| 340 | 246.7 | 275.9 | 213.8 | 279.9 | 271.3 | 234.8 | 170.6 | 251.1 |
| 341 | 539.3 | 411.3 | 601 | 608.3 | 542.6 | 515.2 | 389.8 | 567.6 |
| 343 | 244.1 | 385 | 83 | 562.5 | 1435.6 | 259.1 | 2195.3 | 417.3 |
| 344 | 1212.4 | 452.6 | 1195.1 | 997.3 | 1945.3 | 1246.2 | 594.8 | 932 |
| 345 | 264.5 | 585.5 | 216.6 | 239.2 | 204.1 | 247.3 | 398.5 | 204.5 |
| 347 | 1738 | 3503.5 | 5107.2 | 2563.1 | 2564.3 | 2751.2 | 1484 | 4149.2 |
| 348 | 3976.7 | 7721.4 | 6875.5 | 4637.6 | 3708.3 | 6099.2 | 5834.6 | 7036.6 |
| 349 | 273.4 | 377.5 | 176.5 | 381.9 | 233.3 | 415.6 | 597.8 | 380.1 |
| 350 | 321.2 | 741.3 | 399.7 | 390.9 | 121.3 | 191.6 | 653.8 | 456.2 |
| 351 | 524.9 | 2215.5 | 274.7 | 977.6 | 159.5 | 507.2 | 2220.4 | 809.3 |
| 352 | 503.6 | 131.4 | 464 | 399.1 | 339.9 | 347.1 | 171.6 | 202.5 |
| 353 | 362.5 | 223.7 | 256.6 | 221.7 | 248.9 | 379.2 | 318.9 | 224.1 |

3j

| SEQ ID NO: | 938TT | 940TT | 941TT | 945TT | 946TT | 947TT | 948TT | 954TT |
|---|---|---|---|---|---|---|---|---|
| 354 | 124.7 | 131.5 | 68.5 | 1831.3 | 2991.1 | 1970.3 | 4151.3 | 697.9 |
| 355 | 60.5 | 58.5 | 18.7 | 651 | 2959.8 | 3221.3 | 3037.9 | 91.9 |
| 356 | 930.6 | 668.1 | 621.5 | 1481.2 | 524 | 619.9 | 852.9 | 343.7 |
| 357 | 668.5 | 1037.6 | 614.1 | 992.7 | 744.6 | 692.6 | 698.9 | 500.3 |
| 358 | 534.1 | 2157.9 | 778.4 | 766.2 | 2015.3 | 1757.9 | 1431.4 | 322.3 |
| 359 | 630.5 | 285.6 | 377.6 | 284.2 | 331.2 | 319.5 | 309.2 | 503.3 |
| 362 | 416.8 | 682.5 | 687 | 883.5 | 1080.8 | 836.2 | 746 | 476.8 |
| 360 | 275.7 | 208.2 | 221.9 | 220.7 | 571.6 | 596.9 | 804.3 | 159.4 |
| 361 | 583.8 | 838.6 | 283.7 | 134.5 | 371.1 | 271.3 | 137.7 | 156.1 |
| 363 | 425 | 358.8 | 438.2 | 340.4 | 460.3 | 536.2 | 369.7 | 849.5 |
| 1 | 912.1 | 505.2 | 651.7 | 1316.8 | 1552.6 | 1201.3 | 1465.6 | 256.1 |
| 2 | 2300.4 | 2928.6 | 1830.4 | 985.5 | 3226.8 | 1970 | 1555.6 | 876.4 |
| 7 | 656.3 | 686.7 | 1076.6 | 47.5 | 1068.9 | 536 | 365.4 | 1299.1 |
| 8 | 1044.1 | 2152.8 | 933.8 | 991 | 820.3 | 808.2 | 739.8 | 1547.8 |
| 9 | 4509.2 | 1083.6 | 1954.2 | 1300.1 | 2078.3 | 3908 | 1283.1 | 685.2 |
| 10 | 140.1 | 88.1 | 122.4 | 1873.2 | 92.1 | 150.4 | 164.5 | 113.4 |
| 11 | 70.2 | 163.3 | 140.5 | 707 | 443.9 | 558.3 | 863.6 | 82.9 |
| 13 | 151.7 | 615.2 | 230.4 | 207 | 349.6 | 491.1 | 268.6 | 107.8 |
| 14 | 292.7 | 1519.9 | 379.4 | 942.7 | 1077.9 | 1723.4 | 1237 | 119.8 |
| 15 | 287.3 | 218.1 | 204.7 | 3524.8 | 341.4 | 2287.5 | 744.4 | 147.9 |
| 16 | 1093.9 | 1353.6 | 1394.3 | 376.6 | 2242.4 | 2345.1 | 4508.1 | 532.5 |
| 17 | 1167.2 | 1155.9 | 933 | 517 | 1588.4 | 984.5 | 1068.3 | 312.3 |
| 19 | 241.1 | 159.7 | 215.2 | 431.1 | 311 | 2812 | 648.8 | 285.5 |
| 20 | 1.2 | 13.8 | 1.1 | 238.8 | 388.1 | 452.5 | 759.1 | 1.2 |
| 21 | 13.1 | 453.2 | 114.2 | 12979.2 | 1497.1 | 2096.8 | 4503 | 98.9 |
| 22 | 3034.3 | 2692.9 | 7458.4 | 7149.4 | 3919.7 | 5688.1 | 5625.7 | 1444.4 |
| 23 | 240.2 | 50.1 | 1.1 | 2306.1 | 246.9 | 2461.4 | 936.2 | 1.1 |
| 24 | 167.4 | 59.1 | 67 | 383.4 | 283.5 | 552.3 | 205.8 | 59.9 |
| 26 | 1363.1 | 333 | 155 | 3026.1 | 1238.7 | 9164 | 2694.5 | 66.1 |
| 27 | 664.2 | 691.5 | 441.3 | 957.5 | 1357 | 954.3 | 1589.7 | 352.8 |
| 29 | 89.7 | 109.7 | 122.7 | 3754.7 | 40.3 | 136.4 | 202.8 | 163.6 |
| 30 | 132.2 | 43.3 | 144.7 | 1236.6 | 203.1 | 1185.3 | 426.3 | 73.8 |
| 31 | 70.5 | 216.2 | 85.5 | 16661.7 | 8943.3 | 13168.1 | 16458.7 | 70.6 |
| 33 | 754.7 | 291.7 | 496 | 10017.8 | 2060.8 | 7990.6 | 3081.2 | 83.8 |
| 34 | 3799.4 | 1463.1 | 2114.5 | 557.9 | 529.3 | 1398.3 | 512.3 | 4496.7 |
| 35 | 49.6 | 245.8 | 449.4 | 283.1 | 1235.6 | 706.1 | 239.4 | 71 |
| 36 | 319.6 | 311.9 | 235.6 | 621.1 | 2677.9 | 398 | 273.3 | 356.8 |
| 37 | 165.2 | 175.1 | 219.1 | 198.1 | 231.1 | 292.9 | 220.8 | 375.8 |
| 38 | 588.7 | 850.6 | 583.8 | 5243.7 | 1146.5 | 3990 | 1615.2 | 79.3 |
| 40 | 474.3 | 418.3 | 456.1 | 5232.8 | 561 | 592.8 | 854.7 | 557.2 |
| 41 | 145.4 | 200.5 | 95.4 | 209.9 | 739.6 | 1408.3 | 703.3 | 263.3 |
| 42 | 259.7 | 422.1 | 296.8 | 134.4 | 388.8 | 299.2 | 320 | 346.4 |
| 43 | 312.7 | 469.7 | 413.4 | 844.8 | 254.3 | 342.2 | 278.6 | 1487.4 |
| 44 | 513.5 | 424.1 | 470.7 | 554 | 1223.3 | 1138.7 | 885.5 | 455.5 |
| 45 | 890.2 | 736.7 | 547.2 | 940.6 | 1426.2 | 1512.1 | 1930.9 | 1179.9 |
| 46 | 245 | 310.6 | 350.6 | 275.4 | 289.5 | 350 | 292.2 | 348.2 |
| 47 | 282.9 | 220.4 | 144.2 | 180.6 | 703.3 | 454.3 | 694.6 | 183.6 |
| 48 | 65.9 | 25.3 | 41.1 | 147.2 | 354.7 | 1468.6 | 413 | 15.7 |
| 49 | 257.1 | 1250.1 | 224.5 | 12537.4 | 5118.7 | 2265.3 | 4031 | 294.4 |
| 50 | 174.5 | 90.2 | 118.5 | 1385.9 | 212.4 | 962.9 | 427.9 | 32.6 |
| 51 | 95.1 | 552.7 | 56.4 | 170.8 | 478 | 419.9 | 827.7 | 730.2 |
| 52 | 197 | 196.4 | 147.1 | 401.4 | 251.1 | 232.6 | 352.8 | 240.3 |
| 53 | 48.5 | 381.9 | 96.1 | 1013.6 | 2192.5 | 931.3 | 1091.5 | 1.7 |
| 54 | 826.4 | 1710.8 | 514.8 | 1477.3 | 1185.6 | 797.4 | 1536.4 | 340.4 |
| 55 | 115.1 | 111.9 | 94.4 | 164.7 | 94 | 80.6 | 89.7 | 130.4 |
| 56 | 64 | 268.4 | 79.2 | 90.4 | 219.3 | 188.7 | 175.5 | 63.7 |
| 57 | 617.9 | 1038.1 | 375.9 | 868.2 | 12415.3 | 3983 | 1493.6 | 579.1 |
| 58 | 584.4 | 972.6 | 292.8 | 2931.7 | 11316.3 | 5093.9 | 2162.2 | 939.4 |
| 59 | 1552.8 | 1358.2 | 1824.4 | 3299.3 | 3044.8 | 3483.9 | 4854.3 | 122.2 |
| 60 | 123.4 | 154 | 130.4 | 239.2 | 412.9 | 378.4 | 248.4 | 139.6 |
| 61 | 193 | 106.4 | 98 | 402.3 | 130.9 | 79 | 142.9 | 155.7 |
| 62 | 1365.1 | 178 | 2305.2 | 2981.4 | 3752.1 | 2025.7 | 3563.2 | 4345.7 |
| 63 | 145.2 | 365.5 | 174.3 | 650.2 | 742.9 | 588.7 | 744.3 | 153.8 |
| 64 | 143.1 | 168.7 | 146.9 | 198.1 | 479.3 | 303.3 | 288.3 | 1482.7 |
| 65 | 149.3 | 80.8 | 54.7 | 446.7 | 254.3 | 265.4 | 155.3 | 56.9 |
| 66 | 834.1 | 822.9 | 752.9 | 332.7 | 1793.6 | 1625.8 | 2019.9 | 272.4 |
| 67 | 35954.4 | 28315.7 | 36691.2 | 2509.3 | 29331.4 | 28689.2 | 19265.7 | 24099.5 |
| 68 | 2348.5 | 1225 | 3289.6 | 23.4 | 760.4 | 1000 | 260.1 | 1110.3 |
| 69 | 3844.9 | 1911.7 | 4757.3 | 675.4 | 2667.4 | 3541.2 | 1114.3 | 7548.2 |
| 70 | 2817.2 | 5474 | 2510.6 | 6068.1 | 4627.5 | 5853 | 4221.9 | 8610 |
| 71 | 194.3 | 578.8 | 125.9 | 216.5 | 9508.5 | 3820.8 | 1470.2 | 84.3 |
| 72 | 588.1 | 1284.2 | 401.1 | 327.2 | 2278.5 | 1343.5 | 1418 | 131 |
| 73 | 258 | 239.7 | 218.8 | 232.7 | 766.7 | 694.8 | 726.4 | 198.6 |
| 75 | 252.1 | 212.9 | 239.3 | 123.9 | 1227.9 | 463.3 | 938.9 | 272.6 |
| 76 | 2962.6 | 845.5 | 915.9 | 198.8 | 1587.9 | 1178 | 574.9 | 3611 |
| 77 | 16342.3 | 2666.5 | 15026.8 | 503.1 | 1235 | 1954.2 | 2093.6 | 4483.2 |
| 78 | 729.3 | 762.4 | 748.4 | 157.2 | 758.2 | 290.5 | 576.4 | 1050.6 |
| 79 | 174.2 | 122.2 | 114.9 | 257.1 | 232.1 | 270.7 | 344.5 | 138 |
| 80 | 1248 | 787.5 | 1009.5 | 282.2 | 770.1 | 649.9 | 1098.8 | 266.3 |
| 81 | 115.6 | 272.3 | 127.3 | 229.2 | 5071.1 | 11031.3 | 7637.7 | 43.7 |
| 82 | 610.7 | 314.6 | 210.5 | 232 | 257.3 | 258.9 | 135.4 | 1823.3 |
| 84 | 94.2 | 94.6 | 92.6 | 83 | 304.7 | 340 | 208.7 | 87.3 |
| 85 | 140.2 | 169.4 | 138.1 | 2066.1 | 1108.1 | 1254 | 441.8 | 428.8 |
| 86 | 39.9 | 71.9 | 99.7 | 82.2 | 84.5 | 383.5 | 141 | 293.5 |
| 87 | 298.4 | 166.5 | 180.3 | 11204.7 | 1172.7 | 669.1 | 1630.9 | 199.4 |
| 88 | 5196.8 | 3340.8 | 5827.4 | 127.5 | 1059.3 | 1704.6 | 635.3 | 1431.5 |
| 89 | 235.6 | 196.8 | 215.8 | 267.6 | 325.5 | 267.5 | 617.5 | 237 |
| 90 | 115.4 | 85.7 | 96.9 | 368.5 | 152.8 | 292.9 | 344.8 | 75.4 |
| 91 | 522 | 538.6 | 254.8 | 3408.3 | 6047.2 | 2646.8 | 1460.5 | 1153.4 |
| 92 | 3787.5 | 7863.1 | 2264 | 316.1 | 7435.1 | 5854.5 | 5932.4 | 213.6 |
| 93 | 338.7 | 224 | 230.8 | 159.4 | 208.2 | 159.2 | 161.6 | 162.1 |
| 94 | 635.6 | 617.5 | 996.8 | 254.1 | 860.9 | 768 | 1265.5 | 29.8 |
| 95 | 699.7 | 1108.4 | 462.4 | 81.3 | 719 | 569.5 | 312.2 | 76.1 |
| 96 | 333 | 207.6 | 214.4 | 289.7 | 323.1 | 290.3 | 295.4 | 231.9 |
| 97 | 416.2 | 279.5 | 425.1 | 563.7 | 405.6 | 387 | 496.6 | 170.1 |
| 98 | 27.3 | 37.6 | 37.7 | 36.2 | 18.7 | 37.2 | 39.6 | 211.1 |
| 99 | 301.5 | 228.7 | 224.2 | 752.5 | 370.7 | 398.9 | 427.9 | 210 |
| 100 | 2314.7 | 3267.4 | 16920.7 | 300.1 | 254.3 | 4199.9 | 860.3 | 2812.9 |
| 101 | 330.3 | 321.7 | 727.2 | 74.4 | 500.6 | 272 | 225.2 | 171.9 |
| 102 | 169.4 | 127.4 | 144.6 | 162.3 | 150.2 | 178.5 | 170.9 | 171.9 |
| 103 | 381.1 | 314.1 | 488 | 277.5 | 491.6 | 397.1 | 366.3 | 377.4 |
| 104 | 692.9 | 415.8 | 921.4 | 315.6 | 185.7 | 234.9 | 58.6 | 310.2 |
| 105 | 372.6 | 381.6 | 637 | 159.3 | 149.3 | 300.4 | 79.5 | 455.3 |
| 106 | 646.1 | 411.7 | 1024.2 | 213.3 | 167.6 | 292.1 | 69.4 | 362 |
| 107 | 267 | 257.5 | 123.5 | 748.7 | 451.6 | 527.6 | 584.4 | 230.2 |
| 108 | 573.6 | 195.9 | 332.9 | 184.1 | 209.2 | 219.8 | 263 | 536.8 |
| 109 | 61.9 | 1019.9 | 56.4 | 186.2 | 3392.9 | 1439.4 | 1742.7 | 27.8 |
| 110 | 25.1 | 2062.4 | 22.9 | 215.1 | 7704.2 | 3177 | 4011.8 | 1.1 |
| 111 | 143.5 | 479.3 | 2111.4 | 41.4 | 269.7 | 337.1 | 266.3 | 190.6 |
| 112 | 551.8 | 742.9 | 559 | 155 | 1022.1 | 1281.4 | 1187.5 | 1294.4 |
| 113 | 99.7 | 563.8 | 103.4 | 189.8 | 444.1 | 262.8 | 316.1 | 223.5 |
| 114 | 503.8 | 603.2 | 350.4 | 104.9 | 714.7 | 677 | 361.5 | 212.4 |
| 115 | 401.8 | 436 | 616.1 | 1714.8 | 863.7 | 903.2 | 724.2 | 444.3 |
| 116 | 209.7 | 203.7 | 150.5 | 2167.8 | 763.4 | 502.8 | 591.3 | 201.2 |
| 117 | 3806.6 | 1057.1 | 3146.1 | 179.1 | 561.9 | 533.2 | 197.2 | 320 |
| 118 | 138.9 | 49.5 | 85.3 | 477.1 | 265.1 | 194.4 | 119.2 | 509.1 |
| 119 | 81.2 | 371.2 | 135.5 | 216 | 567.1 | 144.4 | 163.5 | 165.4 |
| 120 | 160.6 | 114.3 | 71.9 | 92.6 | 176.6 | 216.8 | 101.4 | 84.2 |
| 121 | 164.4 | 411.2 | 437.2 | 213.3 | 3724.5 | 1512.3 | 3717.5 | 67.3 |
| 122 | 98.8 | 80.1 | 243.2 | 1399.7 | 264.3 | 428.5 | 386 | 304.3 |
| 123 | 228.3 | 146.3 | 183.8 | 86 | 273.3 | 303.5 | 160.2 | 337.2 |
| 124 | 151.3 | 149.7 | 152.5 | 120.2 | 120.6 | 139.9 | 109.1 | 1219.8 |
| 125 | 909.1 | 689.8 | 819.3 | 575.9 | 33514.1 | 1041.2 | 939.8 | 1157.9 |
| 126 | 1425.9 | 1166.4 | 900.7 | 103.3 | 147.1 | 234.7 | 109.9 | 694.2 |
| 127 | 99.1 | 86.5 | 106.2 | 122.9 | 202.2 | 163.7 | 251.1 | 114.5 |
| 128 | 231.7 | 208 | 253.1 | 214 | 261.3 | 71697.2 | 219.5 | 291.6 |
| 129 | 202.2 | 353.5 | 133.8 | 1125.3 | 2440.8 | 1025.8 | 1063.6 | 165.3 |
| 130 | 345.4 | 395.1 | 121 | 69 | 388.5 | 391.7 | 446.8 | 121.4 |
| 131 | 168.1 | 194.1 | 81.9 | 126.4 | 965.8 | 403.9 | 495.8 | 134.7 |
| 132 | 181 | 188.5 | 164.5 | 532.9 | 286.9 | 263.7 | 252.1 | 213.2 |
| 133 | 101.3 | 107.4 | 143.6 | 234.5 | 193.6 | 164.6 | 236.4 | 134.6 |
| 134 | 208.4 | 308.8 | 149 | 144 | 300.6 | 320.7 | 552.5 | 107.9 |
| 135 | 238.9 | 233.2 | 326.6 | 225.1 | 687.6 | 468.7 | 352.5 | 301.7 |
| 138 | 96.3 | 108.4 | 108 | 222.7 | 408.8 | 249.3 | 192.4 | 170.3 |
| 139 | 165.6 | 99.9 | 76.6 | 136.8 | 269.3 | 296.3 | 159 | 95.6 |
| 140 | 2802.5 | 2059.9 | 1086.6 | 36.8 | 599.5 | 750.1 | 666.1 | 1.3 |
| 141 | 2290.9 | 2263.4 | 2358.9 | 108.9 | 934.1 | 627.7 | 325.8 | 732.5 |
| 144 | 7698.2 | 8602.5 | 444.5 | 323.9 | 12464.5 | 11467.6 | 7038 | 368 |
| 145 | 193.7 | 146.1 | 183.3 | 157.9 | 225.5 | 228.7 | 268.8 | 245.8 |
| 146 | 240.8 | 175.6 | 204.2 | 249.1 | 261 | 358.4 | 743.9 | 242.2 |
| 147 | 47.8 | 28.4 | 34.3 | 55 | 200.2 | 100.2 | 51 | 64.4 |
| 148 | 229.4 | 308.8 | 238.2 | 263.9 | 480.4 | 561.5 | 358.6 | 145.1 |
| 149 | 551.3 | 349.3 | 339.3 | 928.4 | 251.7 | 301.5 | 518.5 | 137 |
| 150 | 164.4 | 207.3 | 163.4 | 141.1 | 291.4 | 208.5 | 289.6 | 323.1 |
| 151 | 126.6 | 323.1 | 102.9 | 132 | 599.9 | 423.7 | 877.9 | 89.4 |
| 153 | 115.7 | 114.6 | 91 | 123.5 | 136.1 | 115.3 | 108.6 | 154.4 |
| 154 | 96.3 | 720.7 | 304.7 | 130.9 | 1984.8 | 5390.1 | 6547.4 | 79.7 |
| 155 | 97.9 | 124.5 | 101.4 | 112.9 | 272.1 | 587.2 | 922.9 | 167.6 |
| 156 | 87.7 | 90.5 | 95.8 | 49 | 682.8 | 491.1 | 331.1 | 59.2 |
| 157 | 111.6 | 117.5 | 128.1 | 151.8 | 208 | 161.9 | 186.4 | 149.3 |
| 158 | 65.6 | 1732.5 | 86.6 | 324.9 | 473.6 | 737.6 | 1773.8 | 15.3 |
| 159 | 3116.8 | 3452 | 5239.7 | 900.3 | 2646.8 | 1464.2 | 1902.5 | 980 |
| 161 | 14481.9 | 1741.5 | 2880.9 | 1.1 | 4831.7 | 8199.7 | 3949.6 | 50.7 |
| 162 | 89.7 | 55.3 | 28.4 | 589.7 | 490 | 589.7 | 221.5 | 35.9 |
| 164 | 177.5 | 8435.5 | 104.7 | 76.7 | 5265.1 | 293.6 | 4062.9 | 88.1 |
| 166 | 4359.3 | 2839.1 | 6163 | 1137.7 | 1081.2 | 2208.2 | 2366.9 | 3751.1 |
| 167 | 1749.1 | 1818.8 | 3470.5 | 1.2 | 1723.1 | 1291.3 | 832.1 | 565.3 |
| 168 | 710.2 | 1123.1 | 423.8 | 59.3 | 1688.4 | 894.7 | 1924 | 122.3 |
| 169 | 1524.8 | 2200.3 | 2148.9 | 1401.8 | 11518.5 | 12728.9 | 6382.1 | 1374.4 |
| 170 | 1062.4 | 2335.7 | 758 | 1597.8 | 2005.8 | 2041.3 | 3494.1 | 467.3 |
| 171 | 3638.6 | 58 | 1497.1 | 1638.6 | 545 | 2916.5 | 723.7 | 1.4 |
| 172 | 663.9 | 679.9 | 727.5 | 420.9 | 685.3 | 596.1 | 496.1 | 610.3 |
| 173 | 416.9 | 738.3 | 140.5 | 328.5 | 1336.6 | 772.4 | 1320.3 | 267.7 |
| 176 | 1.1 | 6520.4 | 150.5 | 99.2 | 3722.2 | 368.3 | 1845.4 | 29.3 |
| 177 | 545.8 | 562.4 | 1099.7 | 185.2 | 574 | 488 | 384.2 | 598 |
| 178 | 1775.4 | 1955 | 376.9 | 512.6 | 2127.5 | 1048.9 | 1852.4 | 1565.3 |
| 179 | 180.3 | 138.6 | 117.4 | 2012.3 | 1196.7 | 828.9 | 1163 | 106.1 |
| 180 | 74.4 | 892.7 | 105.8 | 237.5 | 803.4 | 419.6 | 473.4 | 114.3 |
| 181 | 9404.2 | 6484.3 | 10300.3 | 941.7 | 4892.7 | 6450.6 | 4354.9 | 9168.5 |
| 182 | 372 | 308.8 | 208.5 | 248.4 | 424.6 | 399.7 | 405 | 287.1 |
| 183 | 264 | 49.6 | 27.6 | 849.9 | 182.8 | 2050.1 | 619.5 | 1.1 |
| 184 | 340.2 | 3360.4 | 202.1 | 1220.7 | 1934.2 | 441.7 | 306.9 | 181.9 |
| 185 | 955.1 | 847.9 | 908.6 | 8586.1 | 5990 | 6583.4 | 4156.5 | 642.7 |
| 186 | 377.1 | 397.9 | 305.4 | 331.6 | 290.1 | 282.2 | 230.3 | 953.8 |
| 187 | 63 | 83.5 | 54.1 | 487.3 | 334.1 | 525.2 | 118.2 | 375.2 |
| 188 | 135.2 | 163.5 | 93.8 | 278.1 | 334.8 | 593.6 | 565 | 40.8 |
| 189 | 97.4 | 79.7 | 73.5 | 170.6 | 247.6 | 288.5 | 313.7 | 63.8 |
| 190 | 71.9 | 271.7 | 441.9 | 766.9 | 331.8 | 397.9 | 570.8 | 70.8 |
| 191 | 1184 | 1205.3 | 431.3 | 1127.3 | 2057.1 | 2357.6 | 1735.3 | 1441.4 |
| 192 | 637.6 | 81.1 | 90.9 | 98.5 | 97.8 | 124.5 | 152.4 | 136.2 |
| 193 | 1083.7 | 1465.1 | 2071.9 | 376.7 | 704.1 | 341.3 | 284.4 | 528.8 |
| 194 | 105.9 | 174.3 | 134.6 | 104.3 | 225.4 | 234.8 | 239.8 | 67.9 |
| 195 | 513.2 | 534.1 | 382 | 172.8 | 221 | 202.4 | 154.9 | 532.6 |
| 196 | 6150.6 | 6442.8 | 10030.2 | 655.3 | 4512.8 | 2383.7 | 1783.6 | 3777.8 |
| 197 | 119.9 | 70.8 | 66.6 | 405.3 | 140.1 | 126.5 | 270.4 | 248.4 |
| 198 | 86.4 | 67.1 | 56.7 | 167.2 | 622.1 | 1324.8 | 1830.6 | 65.7 |
| 199 | 63.7 | 49.5 | 36.5 | 946.4 | 3952.8 | 4557 | 3993.9 | 70 |
| 200 | 141.2 | 131.1 | 93.9 | 326.4 | 480.8 | 559.4 | 384.1 | 118.8 |
| 201 | 99.9 | 125.1 | 64.3 | 1769.6 | 3178.7 | 2044.9 | 3554.3 | 746.9 |
| 203 | 205.7 | 2333.5 | 101.7 | 55 | 1633.6 | 575.7 | 143.9 | 68.5 |
| 204 | 536.9 | 539.6 | 677.1 | 33.9 | 1308 | 734.6 | 891.1 | 781.5 |
| 205 | 2519.6 | 5145.4 | 5497.1 | 266.3 | 3930.6 | 3699 | 1755.2 | 3034.5 |
| 206 | 161.9 | 155.6 | 164.4 | 948.8 | 1321.7 | 387.6 | 243.4 | 466.4 |
| 207 | 632.9 | 3069.3 | 716.5 | 82.8 | 354.7 | 315 | 82.2 | 99.4 |
| 208 | 414.1 | 294.1 | 69.8 | 102.5 | 523.4 | 2129.8 | 361.4 | 69 |
| 209 | 2353.2 | 3015.8 | 3230.6 | 167.6 | 1434.9 | 1049.6 | 343.5 | 3631.8 |
| 211 | 25849.9 | 14301.8 | 31677 | 367.5 | 805.9 | 1538.7 | 536.8 | 17099.2 |
| 212 | 806.2 | 1682.7 | 669.3 | 1766.7 | 1465.3 | 1682.1 | 1111.3 | 2465.1 |
| 213 | 95.8 | 142 | 90.3 | 97.7 | 93.5 | 71.1 | 127 | 3700.6 |
| 215 | 908.3 | 4183.7 | 1058.1 | 54.1 | 546.4 | 345.5 | 127.3 | 143.3 |
| 216 | 474.8 | 805.2 | 456.5 | 290.5 | 173.7 | 292.6 | 242.1 | 234.8 |
| 217 | 310.4 | 448.5 | 198 | 253 | 2353.6 | 1241.6 | 1337.2 | 128.5 |
| 218 | 356.8 | 253.7 | 304.9 | 121 | 189.9 | 218 | 303.7 | 349.5 |
| 220 | 88.7 | 59 | 60.1 | 118.1 | 89.5 | 87.6 | 93.5 | 429 |
| 221 | 480.5 | 659.6 | 319.4 | 233.3 | 1004.2 | 1199.6 | 880.1 | 240.6 |
| 223 | 244.2 | 220.3 | 254.2 | 2169.6 | 392.2 | 560.5 | 572.7 | 233.1 |
| 227 | 757 | 501.6 | 622.8 | 6541.8 | 749.4 | 5527.9 | 2138.8 | 93.6 |
| 228 | 608.7 | 551 | 1481.7 | 131.1 | 431.4 | 377.7 | 265 | 587.1 |
| 229 | 493.1 | 133.9 | 211.8 | 452.4 | 129.8 | 269.4 | 179.7 | 599 |
| 230 | 161.6 | 103.2 | 123.8 | 1187.9 | 2084.8 | 2370.1 | 4149.4 | 75.2 |
| 231 | 118.2 | 789.1 | 176.3 | 80 | 752.2 | 257.9 | 129.9 | 148.9 |
| 232 | 941.1 | 198.3 | 129.7 | 1787.8 | 868.5 | 6851.2 | 1950.1 | 5.6 |
| 233 | 7265.5 | 4514.5 | 2133.7 | 1354.4 | 13569.2 | 13328.5 | 4088.9 | 897.7 |
| 235 | 824 | 100.3 | 178.6 | 1170.4 | 445.6 | 1811 | 569.9 | 75.9 |
| 236 | 205.3 | 143.9 | 239.7 | 348.8 | 434.4 | 422.2 | 446.1 | 266.4 |
| 237 | 1942.7 | 1890.5 | 1088.6 | 2229.9 | 2092.3 | 1996.6 | 2088.9 | 774.4 |
| 238 | 939.7 | 1507.6 | 905.5 | 237.4 | 920 | 814.4 | 934.8 | 213.8 |
| 239 | 155.3 | 1246.4 | 106.2 | 990 | 1304.2 | 963.5 | 415.2 | 125.6 |
| 240 | 105.3 | 1516.5 | 105.5 | 2154.1 | 1232.9 | 1172.8 | 394.5 | 111.2 |
| 241 | 298.2 | 3242 | 161.3 | 3194.2 | 2781.8 | 2574.4 | 962 | 156 |
| 242 | 6684 | 765 | 2229.5 | 13301.5 | 22076.9 | 31987.1 | 27579.2 | 969.6 |
| 243 | 154.1 | 116 | 133.6 | 2751 | 287.9 | 733.2 | 891.1 | 152.3 |
| 244 | 177 | 177.5 | 176.5 | 466.1 | 826.4 | 342.9 | 309.4 | 68.7 |
| 246 | 291.6 | 200.2 | 283.7 | 627.1 | 1322 | 1294.2 | 1779 | 143.8 |
| 247 | 98.8 | 89.9 | 132.5 | 88.7 | 163 | 133.7 | 73.4 | 283.9 |
| 248 | 126.4 | 1414.5 | 201.1 | 404 | 3465.6 | 1012.6 | 1020 | 178.9 |
| 249 | 782.4 | 3162 | 1403.3 | 76.1 | 1097.8 | 767.3 | 537.1 | 537.9 |
| 251 | 161.5 | 155.1 | 63.5 | 1785.1 | 627.7 | 1481.5 | 1000.6 | 82.3 |
| 253 | 264.5 | 218 | 442.9 | 168.6 | 424.5 | 446.9 | 362.6 | 279.9 |
| 254 | 105.6 | 2093.1 | 81.7 | 82.5 | 1493.7 | 652.8 | 622.8 | 398.9 |
| 255 | 1747.2 | 2263.9 | 395 | 659.6 | 2271.9 | 1148.5 | 1978.8 | 1845.7 |
| 256 | 435.9 | 539.6 | 279.6 | 2547.3 | 3827.2 | 1885.7 | 1217.9 | 1110.2 |
| 257 | 56 | 110.7 | 80.2 | 207.2 | 269.3 | 316 | 390.9 | 8.1 |
| 258 | 9.3 | 1.3 | 118.2 | 870 | 206.6 | 1331.3 | 3545.5 | 38.6 |
| 259 | 108.7 | 29.1 | 63 | 254.6 | 602.2 | 1965.4 | 1032.4 | 1.2 |
| 260 | 164.7 | 153.3 | 244.8 | 156.4 | 212.5 | 156.2 | 106.4 | 401.2 |
| 261 | 991.9 | 382.7 | 312.5 | 75.3 | 207.2 | 161.7 | 238.6 | 71.9 |
| 263 | 714.7 | 331.8 | 539.2 | 1150 | 469.9 | 540.1 | 765.1 | 394.2 |
| 263 | 186.9 | 138 | 97.6 | 1287.2 | 1762.6 | 2495.8 | 3807.6 | 183.3 |
| 265 | 788.6 | 425.8 | 473.1 | 76.4 | 87.4 | 170.1 | 56.1 | 398 |
| 266 | 353.2 | 233.3 | 346.6 | 277.1 | 270.4 | 331.4 | 210.9 | 954.6 |
| 256 | 72.3 | 174.2 | 105.6 | 365 | 383.6 | 281.3 | 202.2 | 129.4 |
| 268 | 281.1 | 1707.5 | 870.9 | 706.9 | 2068.2 | 688.8 | 318 | 283.3 |
| 269 | 39.1 | 44.6 | 40 | 54.8 | 173.2 | 430.9 | 328.8 | 58.9 |
| 270 | 215.2 | 272.7 | 184.8 | 275.7 | 242.6 | 247.3 | 201.7 | 957.5 |
| 271 | 235.7 | 337.1 | 250.4 | 160.2 | 871.9 | 511.6 | 907.5 | 198.1 |
| 272 | 413.3 | 461.6 | 314.7 | 697 | 411.8 | 753.7 | 501.7 | 539.4 |
| 273 | 1403.7 | 2489.3 | 5667.8 | 24.3 | 1615.9 | 2911.3 | 1683 | 814.1 |
| 274 | 614.7 | 410.3 | 702.2 | 2259.7 | 916.5 | 1540.8 | 1573.5 | 855 |
| 275 | 249.7 | 229.2 | 228.5 | 8716.5 | 2253.7 | 2452.5 | 1476.9 | 255.5 |
| 276 | 1102.2 | 729.4 | 823 | 8564.6 | 1180 | 8452.9 | 3389.5 | 78.2 |
| 277 | 166.3 | 154.9 | 175.4 | 443.3 | 274.9 | 287.7 | 236.4 | 171 |
| 278 | 409.1 | 57.7 | 133.6 | 461.1 | 1337.1 | 1922.6 | 1313.9 | 21.4 |
| 279 | 3251.5 | 3522.3 | 3542.3 | 82.4 | 1789.5 | 2134.1 | 1300.8 | 1253.5 |
| 280 | 3966.4 | 3899.2 | 3833.5 | 208.1 | 1888.5 | 3042.7 | 1982.8 | 1794.8 |
| 281 | 19.5 | 547.7 | 210.9 | 28.9 | 707.3 | 438.3 | 349.4 | 158 |
| 282 | 204.3 | 211.2 | 288.1 | 298.4 | 427.8 | 422.4 | 236.1 | 272.7 |
| 283 | 238.5 | 204.2 | 254 | 221.9 | 351.9 | 341.6 | 284.8 | 456.3 |
| 284 | 74.4 | 60.6 | 95.4 | 58.4 | 2258.3 | 84.1 | 82.5 | 93.7 |
| 285 | 116.8 | 93.3 | 101.5 | 95.5 | 93.9 | 98.8 | 108.7 | 120.7 |
| 286 | 151.8 | 621.9 | 136.9 | 73 | 31 | 112.7 | 64.6 | 214.1 |
| 287 | 106.5 | 73.4 | 112.1 | 121 | 113.4 | 88.9 | 92.4 | 149.7 |
| 288 | 165.7 | 147.9 | 139.4 | 188.3 | 157.7 | 159.2 | 153.4 | 210.6 |
| 289 | 361.8 | 386.8 | 175.9 | 1115.3 | 4422.6 | 4190.9 | 1131.9 | 143.3 |
| 291 | 48.4 | 122.1 | 79.7 | 80.2 | 146.2 | 305.5 | 248.8 | 57.2 |
| 292 | 105.8 | 222.9 | 15.8 | 2034.2 | 2474.9 | 1817.6 | 494.7 | 16.9 |
| 293 | 79.2 | 522.4 | 59 | 729.5 | 1441.8 | 926 | 922.7 | 76.1 |
| 295 | 337.6 | 458.1 | 827.4 | 131.1 | 2369 | 2332.1 | 1528.5 | 122.4 |
| 296 | 383.8 | 625.7 | 393.8 | 207.2 | 1441.2 | 1567.1 | 2234 | 1401.5 |
| 297 | 53 | 59 | 28.1 | 437.4 | 57.3 | 124.9 | 58.8 | 72.5 |
| 298 | 391.9 | 287.2 | 290.1 | 297.6 | 584.3 | 544.1 | 371.3 | 310.6 |
| 299 | 923.9 | 1489.6 | 612.9 | 234.9 | 1909.5 | 2964.3 | 2109.9 | 599.9 |
| 300 | 418.5 | 788.5 | 191.3 | 336 | 1170.1 | 795.1 | 1388 | 351.3 |
| 301 | 991 | 481.9 | 1125.5 | 359.4 | 219.4 | 308.6 | 234.6 | 849 |
| 302 | 23.5 | 10.4 | 20.2 | 207 | 135.3 | 153.1 | 376.5 | 9.2 |
| 303 | 1127.8 | 805.7 | 1035.8 | 76.4 | 260.7 | 316 | 336 | 830.1 |
| 304 | 168.9 | 328.4 | 141.9 | 2398 | 458.1 | 665 | 1628.3 | 347.3 |
| 305 | 615.6 | 310.9 | 1835.6 | 139.9 | 1686.4 | 577.1 | 314.2 | 187.1 |
| 306 | 157 | 151.3 | 142.3 | 1385.7 | 410.9 | 361.9 | 901.3 | 131.6 |
| 307 | 130.6 | 104.8 | 192.1 | 1073.9 | 343.2 | 232.4 | 160.4 | 141.2 |
| 308 | 2650.8 | 1762.2 | 3182.2 | 208.5 | 559.7 | 737.4 | 291.1 | 2599.7 |
| 310 | 283.4 | 464.8 | 253.6 | 85.6 | 100.7 | 156.8 | 136.2 | 1022.4 |
| 311 | 179.3 | 173.4 | 57.1 | 111.3 | 657.6 | 321.6 | 401.6 | 52.1 |
| 312 | 292.8 | 760.1 | 295.9 | 36.9 | 34.2 | 289.2 | 131.1 | 2976.1 |
| 313 | 430.3 | 1430.7 | 249 | 92.5 | 552.3 | 277.7 | 267 | 157.2 |
| 314 | 226.3 | 371.8 | 186.9 | 342.8 | 2406.4 | 1007.7 | 840.8 | 106.5 |
| 315 | 309.4 | 351.9 | 325.9 | 30.1 | 395.5 | 278.5 | 274.6 | 535.1 |
| 316 | 209.5 | 432.1 | 259.5 | 113.1 | 414.1 | 508.4 | 795.4 | 296.6 |
| 317 | 144.3 | 130.5 | 141.8 | 227.4 | 261.4 | 240 | 204 | 160.6 |
| 318 | 107.5 | 220.6 | 62.4 | 340.5 | 222.2 | 300.4 | 303.5 | 33.3 |
| 319 | 498.2 | 410.5 | 297.8 | 132.9 | 340.8 | 346.8 | 430.1 | 820.9 |
| 320 | 581.2 | 637.7 | 414.9 | 113.7 | 262.1 | 263.9 | 280.4 | 504.6 |
| 321 | 733.9 | 546.4 | 690.4 | 441.5 | 201.4 | 365.2 | 236.3 | 491.1 |
| 322 | 217.9 | 299 | 263.9 | 192.8 | 327.7 | 307.9 | 337.2 | 518.8 |
| 323 | 3187.2 | 4533.5 | 2223.1 | 758 | 4003.9 | 2801.5 | 1477.2 | 1113.1 |
| 324 | 69.4 | 506.8 | 68.6 | 123.4 | 493.6 | 420.7 | 324.7 | 47.1 |
| 325 | 450.9 | 358.4 | 218.3 | 215.6 | 509.5 | 446.4 | 622 | 185.7 |
| 326 | 2420.8 | 2944.2 | 761.2 | 377.6 | 2798.7 | 2211.2 | 3775.5 | 127.9 |
| 327 | 67.4 | 1.1 | 3.5 | 294.9 | 23.8 | 104.1 | 48.9 | 1.1 |
| 328 | 488.9 | 519.1 | 682.6 | 28.9 | 478.5 | 335.1 | 132.2 | 219.6 |
| 329 | 22.8 | 62 | 67.7 | 356.2 | 65 | 51.2 | 64.3 | 179.2 |
| 330 | 40.2 | 11.3 | 38.3 | 50 | 722.3 | 567.2 | 650.1 | 45.5 |
| 331 | 273.9 | 221.2 | 263.6 | 301.3 | 394.4 | 336.3 | 281.2 | 667.1 |
| 333 | 901.4 | 799.4 | 1778.7 | 71.1 | 251.5 | 317.3 | 197.7 | 472.4 |
| 334 | 142.6 | 391.3 | 161.2 | 132.6 | 683.2 | 297.3 | 816.3 | 123.4 |
| 335 | 92.1 | 83.6 | 139.7 | 122.3 | 635.2 | 109.4 | 93 | 650.1 |
| 336 | 415.5 | 361.2 | 472.6 | 55.1 | 215.3 | 220 | 144.3 | 242.6 |
| 337 | 248.1 | 1107.3 | 362.9 | 456.2 | 546.9 | 381.8 | 2046.3 | 137 |
| 338 | 116.6 | 210.1 | 98.7 | 249.2 | 759.2 | 1019.7 | 678.9 | 129.6 |
| 339 | 410.3 | 355.2 | 381.9 | 207.7 | 358.5 | 303.8 | 255.2 | 422.3 |
| 340 | 222.1 | 232.5 | 256.4 | 303.1 | 602.9 | 95894.7 | 123847.4 | 268.6 |
| 341 | 340.4 | 368.3 | 779 | 229.7 | 428.7 | 419.5 | 322 | 798.8 |
| 343 | 351.3 | 283.2 | 67.9 | 210.7 | 808.4 | 2720.6 | 7228.2 | 3446.2 |
| 344 | 1130.7 | 1272.9 | 909.5 | 155.6 | 531.7 | 706.2 | 595.7 | 1725.9 |
| 345 | 214.4 | 187.9 | 216.5 | 326.2 | 289.7 | 349.2 | 223.2 | 308.6 |
| 347 | 780 | 4322.6 | 1880.3 | 3519.1 | 4904.6 | 2435.8 | 1042.8 | 1057 |
| 348 | 2033.1 | 8452.1 | 3722.6 | 8444.3 | 8098.7 | 3669.4 | 2324.6 | 2993.4 |
| 349 | 414.1 | 298.8 | 450 | 384.7 | 420.6 | 314.2 | 331.6 | 323.1 |
| 350 | 193.6 | 155.1 | 166.7 | 164.9 | 603.4 | 717.3 | 1008.9 | 102.4 |
| 351 | 149.8 | 87.7 | 51.7 | 177.8 | 1787.4 | 975.6 | 863.9 | 113 |
| 352 | 305.1 | 222.3 | 426.3 | 134.8 | 158.9 | 214.2 | 127.4 | 1132 |
| 353 | 228.2 | 245.9 | 178.8 | 150.1 | 197.2 | 301.1 | 428.1 | 413 |

| SEQ ID NO: | 955TT | 956TT | 957TT | 959TT | 960TT | 961TT | 962TT |
|---|---|---|---|---|---|---|---|
| 354 | 87.9 | 200.9 | 8.7 | 55.2 | 27.7 | 427 | 68.1 |
| 355 | 94.6 | 90.3 | 49.7 | 131.5 | 43.1 | 452.4 | 87.9 |
| 356 | 581.7 | 511.3 | 566.1 | 708.3 | 716.3 | 1212.4 | 709.2 |
| 357 | 586.6 | 1247.1 | 595.1 | 664.9 | 783 | 891.1 | 787.2 |
| 358 | 714.8 | 1339.8 | 621 | 733.9 | 978.3 | 526.4 | 1369.9 |
| 359 | 451.3 | 315.7 | 386.8 | 424.9 | 420.5 | 309.2 | 381.1 |
| 362 | 290 | 512.7 | 459.8 | 835.1 | 394.4 | 252.8 | 419.6 |
| 360 | 221.5 | 346.6 | 132.9 | 201.9 | 228.2 | 220.9 | 348.6 |
| 361 | 182.4 | 412 | 1902 | 403.3 | 846.8 | 964.3 | 1117.4 |
| 363 | 416.2 | 327.3 | 406.2 | 502.2 | 548.9 | 506.1 | 522 |
| 1 | 675.4 | 869.8 | 676.6 | 267.5 | 452.3 | 717.4 | 496.3 |
| 2 | 1844.7 | 3591.1 | 3028.1 | 3641.6 | 3980.3 | 3803.6 | 3593.4 |
| 7 | 309.8 | 581.3 | 550.1 | 630.4 | 1040.2 | 1288.9 | 1720.8 |
| 8 | 1337.3 | 1229.5 | 1489.8 | 865.2 | 743.2 | 1080.8 | 1023.5 |
| 9 | 2938.3 | 3522 | 7292.5 | 1627.8 | 13667.8 | 4833.1 | 816.2 |
| 10 | 58.5 | 57.9 | 102.2 | 97.4 | 77.9 | 90.8 | 91 |
| 11 | 237.4 | 291.8 | 198.6 | 338.4 | 478.9 | 402.4 | 127 |
| 13 | 245.4 | 217.8 | 83.9 | 97 | 110.5 | 141.1 | 325.4 |
| 14 | 1390 | 1022.1 | 201.2 | 221.1 | 188.4 | 343.3 | 1201.7 |
| 15 | 92.3 | 394.2 | 192.7 | 775.3 | 322.5 | 337.5 | 375.9 |
| 16 | 1190 | 2000.9 | 686.2 | 1137.7 | 815.9 | 1366.2 | 1403.6 |
| 17 | 298.5 | 665.4 | 989 | 1727.8 | 1644 | 1382.7 | 773.2 |
| 19 | 176.4 | 249.5 | 161.8 | 245.1 | 209.8 | 154.9 | 170.7 |
| 20 | 1.1 | 58.3 | 1.4 | 133.8 | 1.1 | 2.2 | 1.1 |
| 21 | 354 | 1554.7 | 106.9 | 1.3 | 129.6 | 94.6 | 88.3 |
| 22 | 1772.4 | 3116.7 | 5851.7 | 6314.1 | 10192.9 | 7077.5 | 2802.8 |
| 23 | 44.4 | 809.8 | 34.3 | 489.7 | 33.2 | 163 | 1.1 |
| 24 | 86.3 | 453.2 | 147.6 | 353 | 90.7 | 121.5 | 117.5 |
| 26 | 645.4 | 2180.5 | 47.8 | 1478.1 | 169.6 | 380.5 | 74.7 |
| 27 | 278.1 | 1212.1 | 159.1 | 236.2 | 335.3 | 339.4 | 261.4 |
| 29 | 78.4 | 81.9 | 23.5 | 82.1 | 53.5 | 68.7 | 59.6 |
| 30 | 71.2 | 234.9 | 129.8 | 239.5 | 51.6 | 114 | 15.5 |
| 31 | 294.9 | 587.2 | 48.2 | 138.9 | 86 | 174.5 | 43.6 |
| 33 | 162.4 | 998.1 | 428.5 | 1117.4 | 279.9 | 251.3 | 313.6 |
| 34 | 3053 | 2498.1 | 3095.7 | 2119.5 | 3047.9 | 2373.9 | 1094.7 |
| 35 | 181.9 | 491.2 | 74 | 441.4 | 22.7 | 965.8 | 17 |
| 36 | 127.6 | 209.5 | 637.3 | 2400.3 | 139.2 | 157.6 | 1485.1 |
| 37 | 166.9 | 139.5 | 190.8 | 131.7 | 237.7 | 198.7 | 233.9 |
| 38 | 130.1 | 678 | 413.5 | 1057.4 | 365.3 | 316.8 | 662.7 |
| 40 | 257 | 450.6 | 6557.8 | 482.9 | 628.5 | 522.6 | 591.2 |
| 41 | 134.2 | 455.4 | 123.4 | 163.6 | 368.6 | 605.8 | 254.3 |
| 42 | 257.3 | 576.9 | 200.4 | 398.3 | 154.3 | 212 | 244.1 |
| 43 | 446 | 239.2 | 748.7 | 367 | 323.5 | 371.3 | 664.8 |
| 44 | 546.1 | 682.4 | 841.1 | 846.6 | 457.9 | 413.3 | 620.1 |
| 45 | 1085.8 | 897.1 | 601.8 | 484.8 | 436.6 | 816.9 | 845.3 |
| 46 | 294.3 | 214.6 | 267 | 376.1 | 303.2 | 283 | 320 |
| 47 | 96.5 | 206 | 140.7 | 192.8 | 168.4 | 247 | 213.3 |
| 48 | 18 | 313.8 | 21.5 | 378.3 | 15 | 41.1 | 1.5 |
| 49 | 303.8 | 472.1 | 236.5 | 221.8 | 366.2 | 411.7 | 363.7 |
| 50 | 78.2 | 293.2 | 108 | 497.3 | 147.7 | 127.2 | 66.9 |
| 51 | 342.3 | 124.4 | 234.4 | 45.5 | 54.4 | 36.3 | 156.3 |
| 52 | 194.3 | 158.4 | 311.6 | 182.3 | 216.4 | 212.3 | 171.6 |
| 53 | 153.6 | 347.3 | 19 | 83.6 | 112.1 | 196.9 | 251.8 |
| 54 | 1255 | 1165.2 | 316.5 | 359.8 | 277.1 | 598.1 | 1248 |
| 55 | 116.8 | 117.3 | 120.3 | 89.7 | 118.2 | 109.3 | 88.7 |
| 56 | 219.8 | 182.9 | 88.1 | 65.6 | 49.5 | 53.3 | 172.8 |
| 57 | 257.9 | 611.8 | 345 | 831.2 | 168 | 1240.7 | 159.2 |
| 58 | 242.6 | 710 | 490.1 | 2548.4 | 205.5 | 1436.5 | 82.1 |
| 59 | 1047.2 | 2248.5 | 1125 | 813.5 | 918.1 | 1999 | 1120.9 |
| 60 | 97 | 300.2 | 154 | 85.5 | 160.5 | 117.3 | 185.6 |
| 61 | 90.4 | 103.2 | 161.9 | 145.1 | 203.2 | 134.9 | 108.2 |
| 62 | 300.7 | 1868.2 | 953.7 | 574.1 | 642.8 | 1633.8 | 139 |
| 63 | 297 | 536.7 | 193.6 | 228.4 | 311.9 | 261.2 | 255.9 |
| 64 | 109.8 | 100.1 | 170.4 | 227.4 | 176.6 | 190.7 | 115.1 |
| 65 | 87.5 | 158.6 | 150.9 | 81.8 | 71.6 | 67.2 | 102 |
| 66 | 1355.7 | 951.2 | 564.5 | 797.6 | 309.4 | 509.5 | 1530.7 |
| 67 | 34223.4 | 31838 | 24742.4 | 36682.2 | 36457.8 | 32604.1 | 43684.2 |
| 68 | 3348.2 | 1692.5 | 1286.8 | 3946 | 5683.4 | 2624.1 | 1368.7 |
| 69 | 7947.5 | 4162 | 3970 | 11781.2 | 10279.8 | 7055 | 5076.1 |
| 70 | 4104.3 | 2568.6 | 4964 | 2477.4 | 881.6 | 933.2 | 2792.2 |
| 71 | 619.9 | 681.8 | 113.5 | 372.3 | 137.1 | 72 | 319.9 |
| 72 | 229.3 | 609.4 | 1269.4 | 639.7 | 229.4 | 694.7 | 159.4 |
| 73 | 260.4 | 365.9 | 207.3 | 238.1 | 275.9 | 264.9 | 416.7 |
| 75 | 149.7 | 302.2 | 171.8 | 538.4 | 453.7 | 249.2 | 115.4 |
| 76 | 2162.3 | 1321.7 | 189 | 2328.1 | 12.2 | 54.4 | 1010.4 |
| 77 | 5244.7 | 2705.9 | 4944.6 | 4760.4 | 4771.9 | 3213.4 | 3514.8 |
| 78 | 310.5 | 589.3 | 1329.2 | 1771 | 866.2 | 805.1 | 952.5 |
| 79 | 231.8 | 135.6 | 383 | 134.3 | 114.6 | 119.6 | 116.4 |
| 80 | 667.1 | 355.6 | 404.3 | 450.5 | 85 | 239.4 | 268.7 |
| 81 | 1253.3 | 1566.6 | 84.2 | 100.9 | 194.3 | 384.9 | 263.5 |
| 82 | 333.1 | 228.4 | 350.7 | 215.3 | 247.9 | 520.6 | 252.5 |
| 84 | 147 | 325.5 | 277 | 141.8 | 114.9 | 106 | 153.2 |
| 85 | 163.8 | 102.1 | 111.6 | 119.6 | 149.3 | 210.2 | 180.5 |
| 86 | 193.8 | 55.9 | 95.3 | 298.1 | 298.3 | 70.2 | 71.1 |
| 87 | 156.9 | 158.6 | 353.7 | 164.2 | 293.6 | 482.8 | 160.9 |
| 88 | 3325 | 4358.2 | 4541.7 | 6014.1 | 7677.1 | 10815.9 | 5006 |
| 89 | 140.5 | 120.8 | 185.6 | 259 | 178.4 | 199.4 | 228.6 |
| 90 | 68.4 | 170.5 | 91.9 | 205.9 | 87.5 | 144.7 | 114 |
| 91 | 249.8 | 383.1 | 110.8 | 1269.1 | 70.9 | 1429.6 | 73.4 |
| 92 | 4953.4 | 6959.3 | 1774.3 | 2917.7 | 2117.8 | 7949.3 | 7560.6 |
| 93 | 201 | 209.6 | 400.5 | 170.5 | 283.1 | 293.5 | 163.4 |
| 94 | 260.4 | 3158.7 | 52.2 | 867.5 | 660.8 | 606.6 | 836.7 |
| 95 | 593.4 | 622.7 | 577.7 | 104.7 | 388.1 | 646.7 | 1203.2 |
| 96 | 165.4 | 233.3 | 200.5 | 123.7 | 184.7 | 171 | 372 |
| 97 | 273.3 | 336.6 | 287.9 | 296.3 | 132.3 | 317 | 370.1 |
| 98 | 70.8 | 41.8 | 25.4 | 16.5 | 25.6 | 32.7 | 30 |
| 99 | 164.8 | 189.4 | 116 | 167.2 | 280.8 | 245.9 | 257.1 |
| 100 | 610.8 | 12721.1 | 16769.4 | 9378.2 | 4271.4 | 15550.1 | 1798.6 |
| 101 | 232.4 | 238.6 | 434.5 | 383.4 | 434.1 | 504.6 | 729.3 |
| 102 | 147.5 | 132.7 | 112.2 | 180.7 | 209.4 | 215.6 | 169.1 |
| 103 | 309.3 | 255.1 | 195.4 | 418.3 | 293.4 | 404.3 | 381.3 |
| 104 | 631.5 | 573.5 | 522.3 | 415.2 | 370.9 | 830.3 | 589 |
| 105 | 655.3 | 488.2 | 398.8 | 564 | 421.8 | 540.9 | 516.4 |
| 106 | 562.5 | 491 | 440.4 | 361 | 470.2 | 736.1 | 469 |
| 107 | 170.3 | 157.5 | 207.8 | 405.5 | 147.6 | 558.5 | 118.6 |
| 108 | 260.5 | 430.5 | 385.5 | 555.3 | 419 | 273.4 | 323.9 |
| 109 | 6189.1 | 2697.1 | 42.6 | 65.5 | 78.8 | 577.2 | 6878.3 |
| 110 | 10703.6 | 3965.4 | 1.2 | 28.1 | 19.7 | 1384.5 | 13039 |
| 111 | 1743.4 | 1684.3 | 944.4 | 1390.4 | 2754.7 | 1147.9 | 3105.8 |
| 112 | 823.1 | 805.8 | 41.7 | 109.8 | 237.7 | 59.8 | 620.1 |
| 113 | 246 | 445 | 478 | 246 | 90.9 | 253.2 | 214.1 |
| 114 | 239.9 | 397.1 | 452.5 | 688.8 | 1076.1 | 566 | 830.3 |
| 115 | 441.3 | 600.8 | 435.6 | 627.2 | 408 | 348.9 | 523.2 |
| 116 | 223.5 | 218.9 | 200.8 | 251.8 | 236.2 | 182.6 | 216.1 |
| 117 | 413 | 582.6 | 4938.9 | 5309.2 | 2714.3 | 3839.8 | 902.6 |
| 118 | 203.1 | 268.2 | 141 | 148.8 | 118.4 | 34.2 | 105.3 |
| 119 | 45.1 | 322.8 | 110.9 | 119.5 | 75.9 | 246.3 | 233 |
| 120 | 63.4 | 106.6 | 118.6 | 184.1 | 122.3 | 82.1 | 114.7 |
| 121 | 461.9 | 1324 | 1289.4 | 211.1 | 422.1 | 737.7 | 749.7 |
| 122 | 243.1 | 213.9 | 52.5 | 140.8 | 84.5 | 274.4 | 144.3 |
| 123 | 189.9 | 195.8 | 480.9 | 135.7 | 146.6 | 163.4 | 216.1 |
| 124 | 130.1 | 117 | 258.6 | 193.4 | 182.9 | 170.1 | 178 |
| 125 | 984.3 | 573.5 | 539.9 | 1065.4 | 967.5 | 1025.7 | 1172 |
| 126 | 1322.2 | 965.1 | 1360 | 738.2 | 631.3 | 1011.4 | 682.8 |
| 127 | 131.7 | 96.4 | 132 | 117.3 | 113.4 | 116.7 | 127.7 |
| 128 | 194.1 | 182.2 | 236.4 | 276.3 | 285.9 | 310.1 | 367.6 |
| 129 | 130.1 | 229.7 | 252.6 | 224.8 | 171.9 | 522.6 | 200.2 |
| 130 | 185.4 | 150.7 | 162.7 | 99 | 93.7 | 89.6 | 207.8 |
| 131 | 95.8 | 152.7 | 148.3 | 47.3 | 74.7 | 96.5 | 94.2 |
| 132 | 163.2 | 168.1 | 192.6 | 193.3 | 258.1 | 217.7 | 272.4 |
| 133 | 204.5 | 249.2 | 84.8 | 160.3 | 70.8 | 65.2 | 75.8 |
| 134 | 287.4 | 159.6 | 98.4 | 197.6 | 118.4 | 129.9 | 184.5 |
| 135 | 373.8 | 551.6 | 416.6 | 392.1 | 459.3 | 328.2 | 406.9 |
| 138 | 137.1 | 115.6 | 126.5 | 195 | 133.1 | 149.9 | 117.4 |
| 139 | 116.4 | 142.3 | 79.7 | 71.6 | 80.2 | 87.7 | 77.6 |
| 140 | 74.5 | 3607.6 | 2148.2 | 1275.7 | 3106.6 | 2235.3 | 1653.3 |
| 141 | 1566.1 | 2429.4 | 761.5 | 1182 | 2077.2 | 1681.8 | 1605.6 |
| 144 | 12425.9 | 7539.3 | 395.2 | 417 | 450.5 | 512.8 | 7238.7 |
| 145 | 160.5 | 137.2 | 206.9 | 220 | 255.1 | 198.3 | 239.2 |
| 146 | 182.1 | 147.4 | 169.7 | 202.3 | 262.8 | 225.5 | 211.9 |
| 147 | 28.6 | 43.9 | 91 | 66.4 | 26.5 | 59.8 | 20 |
| 148 | 205.3 | 553.1 | 180.2 | 198 | 270.3 | 668.6 | 306.4 |
| 149 | 325 | 326.5 | 236.6 | 362.1 | 407.1 | 765.1 | 342.1 |
| 150 | 197.1 | 234.6 | 172.3 | 171.9 | 270.8 | 246.9 | 159.2 |
| 151 | 123.1 | 264.2 | 95.7 | 127.8 | 158.8 | 148.1 | 257.2 |
| 153 | 103.8 | 118.2 | 112.8 | 119.6 | 110.6 | 115.4 | 113.9 |
| 154 | 304.4 | 1676.6 | 2431.9 | 408.8 | 152.5 | 2641.1 | 142.4 |
| 155 | 498.7 | 158.7 | 136.4 | 138 | 136.6 | 144.9 | 139.3 |
| 156 | 95.4 | 89.8 | 63.6 | 51.8 | 74.1 | 120.8 | 65.3 |
| 157 | 178 | 115.2 | 155.5 | 132.3 | 138.2 | 159.9 | 181.3 |
| 158 | 283.4 | 1174.2 | 19.8 | 16.2 | 1.2 | 13.6 | 578.5 |
| 159 | 1776.8 | 2641.6 | 1398.3 | 1601.9 | 3134.9 | 3315.7 | 3396 |
| 161 | 9817.8 | 2623.3 | 177.1 | 129.7 | 6.7 | 152.9 | 1887.4 |
| 162 | 45.7 | 101.6 | 27.6 | 150.8 | 40.3 | 76.2 | 46.9 |
| 164 | 78.1 | 707 | 463.5 | 110.3 | 193.8 | 333.7 | 3770.9 |
| 166 | 6384 | 2992.4 | 4919.5 | 5671.4 | 6028.1 | 6429.2 | 3769.1 |
| 167 | 1191.3 | 1999.3 | 1864 | 686.4 | 1834.7 | 2207.6 | 2362.6 |
| 168 | 1167.3 | 843.3 | 2714.3 | 1862.4 | 1004 | 922.5 | 1487.6 |
| 169 | 3437.7 | 4365.5 | 1880.1 | 3159.8 | 1921.4 | 5836 | 1307.9 |
| 170 | 1488.1 | 2441.6 | 1019.6 | 1307.1 | 1150.4 | 2496.9 | 1953.8 |
| 171 | 1.2 | 722.2 | 1.2 | 760.4 | 1.2 | 725.9 | 1.2 |
| 172 | 590.7 | 573.3 | 719.5 | 631.6 | 816.5 | 666.4 | 904.9 |
| 173 | 408.8 | 355.1 | 171 | 213.4 | 406.9 | 481.6 | 564.2 |
| 176 | 1175.5 | 1461.1 | 175.7 | 8.4 | 704.9 | 850.3 | 2537.2 |
| 177 | 536.9 | 672.1 | 597.5 | 376.7 | 544 | 817.5 | 635.8 |
| 178 | 385.8 | 730.5 | 91.3 | 209.5 | 184.7 | 233 | 1073.8 |
| 179 | 74.1 | 84.7 | 60.3 | 70.3 | 71.4 | 127.1 | 145.7 |
| 180 | 156.8 | 498.8 | 119.5 | 132.1 | 72.9 | 109.4 | 609.9 |
| 181 | 8682 | 7928.2 | 10784.9 | 10442 | 14140.4 | 12487.9 | 12014.6 |
| 182 | 323.1 | 400.6 | 375.2 | 349.8 | 535.4 | 405.4 | 334.3 |
| 183 | 128.7 | 461.7 | 1.2 | 388.5 | 15.5 | 53.1 | 1.3 |
| 184 | 279.4 | 565.1 | 227.8 | 327.3 | 211.1 | 272.9 | 2642.9 |
| 185 | 1142.8 | 848.2 | 1463.7 | 1098.5 | 1043 | 1044.1 | 911.4 |
| 186 | 444.5 | 436.7 | 360.3 | 324.6 | 419 | 403 | 314.3 |
| 187 | 214.8 | 123.4 | 366.1 | 170.7 | 79.5 | 90.4 | 76.6 |
| 188 | 94.7 | 141.3 | 105.2 | 357.2 | 157 | 110 | 170.5 |
| 189 | 49.2 | 74.3 | 80 | 146.6 | 60.9 | 66.5 | 88 |
| 190 | 267.8 | 422 | 71.2 | 95.9 | 85.5 | 102.1 | 152.5 |
| 191 | 825.2 | 845.3 | 1874.8 | 739.8 | 734.8 | 1020.6 | 520.6 |
| 192 | 67.8 | 308.7 | 77.4 | 94.4 | 80.7 | 77.4 | 79.8 |
| 193 | 695 | 1573.5 | 2485.3 | 1849.3 | 2885.4 | 3460.8 | 1615.5 |
| 194 | 173.6 | 299.7 | 106.6 | 134.3 | 150.7 | 122.6 | 175.9 |
| 195 | 248.2 | 343.9 | 371.7 | 347.9 | 320.2 | 194.4 | 297.7 |
| 196 | 7207.4 | 7285.3 | 5142.4 | 2474.2 | 6626.6 | 8775.3 | 11352.4 |
| 197 | 50.6 | 93.6 | 113.8 | 142.3 | 96.4 | 86.5 | 58 |
| 198 | 56.8 | 44.6 | 36.9 | 51.1 | 66.8 | 47.9 | 128.9 |
| 199 | 135.2 | 104.6 | 57.8 | 204.7 | 35.2 | 599.8 | 103.1 |
| 200 | 110.8 | 310.7 | 104.4 | 327.5 | 121.9 | 121.6 | 147.5 |
| 201 | 125.9 | 200.1 | 46.9 | 69.2 | 25.3 | 505.3 | 54.7 |
| 203 | 163.6 | 319 | 130.2 | 85 | 252 | 312.1 | 621.1 |
| 204 | 826.2 | 879.7 | 567.6 | 726.8 | 704.1 | 434 | 980.1 |
| 205 | 4963.1 | 7695 | 2785.7 | 6249.9 | 6069.1 | 6172.2 | 6469.8 |
| 206 | 384 | 1284 | 196.8 | 1397.4 | 323.3 | 282.2 | 224.9 |
| 207 | 1180.7 | 1623.7 | 402.1 | 2190.2 | 453.5 | 1652.9 | 1647 |
| 208 | 495.8 | 653.7 | 150.2 | 227.7 | 257 | 340.5 | 253.6 |
| 209 | 1608.4 | 2981.5 | 2844.2 | 445.8 | 5286.9 | 4175.6 | 6653.1 |
| 211 | 7731.4 | 15392.6 | 3699.2 | 33617.1 | 23929.6 | 28201.9 | 37299.8 |
| 212 | 911.5 | 692 | 1485 | 440.7 | 207.7 | 396.6 | 971.4 |
| 213 | 58.3 | 77.2 | 150.2 | 91.5 | 119.6 | 83.2 | 84.4 |
| 215 | 1364.9 | 1835.2 | 477.2 | 1858.8 | 394.4 | 2522.1 | 2910.2 |
| 216 | 540.7 | 636.6 | 665 | 441.7 | 610.8 | 635.7 | 494.3 |
| 217 | 196.1 | 494.8 | 258 | 300.8 | 260 | 97.9 | 424.1 |
| 218 | 359.4 | 357 | 308.6 | 572.5 | 327.9 | 346.3 | 318.6 |
| 220 | 87.6 | 66.5 | 71.4 | 89.9 | 106 | 86.7 | 88.5 |
| 221 | 195.8 | 787.9 | 397 | 518.1 | 651.9 | 372.5 | 497.7 |
| 223 | 248.3 | 279.5 | 456 | 247.2 | 226.7 | 308.9 | 202.1 |
| 227 | 326.2 | 1074.9 | 579.8 | 1616.2 | 517.9 | 516.4 | 447.3 |
| 228 | 377.5 | 502.7 | 583.4 | 486.6 | 764.6 | 521.7 | 871.2 |
| 229 | 311.2 | 113.4 | 1212.9 | 377.4 | 152.7 | 93.4 | 149 |
| 230 | 417.2 | 297.5 | 120.9 | 131.8 | 135.8 | 242.5 | 285.4 |
| 231 | 108.5 | 189.8 | 88.2 | 67.4 | 140.1 | 160.7 | 309.4 |
| 232 | 465.5 | 1573.3 | 41.4 | 973.5 | 118.3 | 273.3 | 78.3 |
| 233 | 728.9 | 3634.1 | 7030.2 | 1396.1 | 3819.1 | 5175.1 | 2235.4 |
| 235 | 37.3 | 474.7 | 88.2 | 526 | 120.4 | 662.1 | 42.3 |
| 236 | 199.7 | 143.3 | 108.3 | 196.9 | 220 | 171.3 | 142.5 |
| 237 | 1614.8 | 1725.3 | 2189.4 | 1342.6 | 2031.3 | 1672.9 | 1475 |
| 238 | 823.6 | 1424 | 1041.5 | 1173.3 | 691.2 | 1142.2 | 1169.5 |
| 239 | 56.1 | 641.7 | 183 | 140.5 | 95 | 88 | 683.1 |
| 240 | 98.3 | 853.8 | 155.4 | 330.5 | 155.1 | 106.4 | 574.8 |
| 241 | 84.4 | 1914.8 | 289.8 | 519.5 | 207.1 | 95 | 1367 |
| 242 | 2194.8 | 989.6 | 2107.8 | 1991.2 | 1042.5 | 1474.6 | 688.1 |
| 243 | 89.9 | 263.3 | 247.9 | 268.6 | 679.7 | 287.2 | 89 |
| 244 | 209.3 | 288.3 | 89.9 | 209.1 | 146.5 | 131 | 131 |
| 246 | 1348 | 810.8 | 270.7 | 434.5 | 85.9 | 160.3 | 487.6 |
| 247 | 113.4 | 92.8 | 68 | 145.3 | 125.8 | 139.4 | 150.2 |
| 248 | 503.9 | 571.2 | 120.3 | 199.5 | 153.6 | 226.1 | 529.7 |
| 249 | 650 | 1958.3 | 945.4 | 442.8 | 746.9 | 674.2 | 1861.5 |
| 251 | 149.3 | 159.2 | 98.7 | 67 | 54.5 | 98.7 | 133.7 |
| 253 | 458.5 | 369.7 | 392.2 | 512.7 | 189.7 | 171.8 | 255.1 |
| 254 | 759.1 | 1048.2 | 56.3 | 201.5 | 144.1 | 322.5 | 1876.1 |
| 255 | 395 | 847.1 | 92.8 | 241.2 | 190.6 | 204 | 937.8 |
| 256 | 497.3 | 504.3 | 202.9 | 1243.9 | 138.2 | 1112.8 | 153.2 |
| 257 | 96.8 | 170.3 | 61.6 | 110.7 | 240.3 | 224.1 | 83.2 |
| 258 | 80.1 | 318.2 | 1.1 | 4 | 1.2 | 194.6 | 1.3 |
| 259 | 31.3 | 422.4 | 35.1 | 291.4 | 170 | 194.9 | 6.1 |
| 260 | 144.2 | 118.9 | 152.1 | 196.1 | 181.1 | 162.3 | 192.9 |
| 261 | 72 | 118.5 | 599.4 | 788.2 | 759.5 | 233.2 | 707.9 |
| 263 | 414.9 | 536.2 | 500.4 | 605.6 | 316.7 | 492.7 | 460.5 |
| 263 | 550.2 | 391.2 | 170.3 | 206.7 | 218 | 261.4 | 299 |
| 265 | 334.6 | 245.7 | 405.7 | 534.5 | 619.5 | 1119 | 574.8 |
| 266 | 546.7 | 433.1 | 317.8 | 513.8 | 421.9 | 266.6 | 397.7 |
| 256 | 69.3 | 168.9 | 137.2 | 94.2 | 115.1 | 101 | 97.3 |
| 268 | 570.4 | 855.7 | 334.9 | 287.8 | 801.2 | 1200.2 | 1032.6 |
| 269 | 17.8 | 25.5 | 51.2 | 32.6 | 33.8 | 37.9 | 56.8 |
| 270 | 313.9 | 169.7 | 378.4 | 245.5 | 183.8 | 220.5 | 267 |
| 271 | 197.8 | 175.4 | 205.9 | 317.3 | 297.9 | 247.6 | 263.9 |
| 272 | 537.8 | 303.4 | 368 | 416.8 | 596.6 | 461.6 | 589.2 |
| 273 | 2896.5 | 2422.4 | 2113.9 | 4788.3 | 2936.5 | 2726.7 | 6835.9 |
| 274 | 736 | 340.7 | 226.1 | 863.7 | 465 | 215.6 | 180.7 |
| 275 | 312 | 220.3 | 428 | 292.8 | 254 | 301.5 | 300 |
| 276 | 290.2 | 1528.1 | 727.2 | 2093.9 | 539.5 | 692.9 | 622.8 |
| 277 | 171.5 | 177.3 | 190.4 | 200.2 | 228.4 | 201.6 | 245.6 |
| 278 | 57 | 615.1 | 90.6 | 495.4 | 201.9 | 350.4 | 20.5 |
| 279 | 2553.9 | 3673.6 | 1781.1 | 3550.4 | 3051.6 | 3161.9 | 3164.5 |
| 280 | 4112.4 | 4496.7 | 2693.5 | 6671.4 | 4029.9 | 3715.1 | 3402.8 |
| 281 | 420.9 | 478.9 | 381.7 | 99.3 | 24.7 | 76.5 | 829.5 |
| 282 | 284.1 | 237.5 | 220.4 | 467.3 | 243.1 | 183.4 | 280.3 |
| 283 | 320.7 | 247.3 | 262.2 | 267.1 | 257.1 | 287.9 | 255.5 |
| 284 | 86.1 | 60.6 | 66.9 | 82.5 | 68 | 91 | 102.6 |
| 285 | 74.5 | 84.5 | 78.8 | 98.8 | 132.4 | 97.7 | 89.8 |
| 286 | 140.3 | 125.8 | 856.5 | 479.2 | 1253 | 1123.8 | 337.3 |
| 287 | 82.7 | 68.3 | 104.9 | 131 | 118.4 | 100.2 | 124.1 |
| 288 | 112.6 | 131.8 | 109.3 | 132.3 | 203.1 | 166.3 | 157.2 |
| 289 | 329.1 | 523 | 74.6 | 1912.1 | 5 | 1194.8 | 79.2 |
| 291 | 72.9 | 135.9 | 147.6 | 116.3 | 111.7 | 106 | 91.2 |
| 292 | 61.3 | 181.2 | 49.9 | 155.8 | 43.9 | 982.9 | 77.4 |
| 293 | 210.2 | 267.7 | 100.5 | 70.6 | 87.4 | 91.2 | 418.7 |
| 295 | 880.3 | 560.6 | 520.9 | 266.4 | 534.9 | 307.3 | 261.4 |
| 296 | 1067.2 | 1234.6 | 688.7 | 782.9 | 718.7 | 604.5 | 724.8 |
| 297 | 47.9 | 64.8 | 51.5 | 87.2 | 38.6 | 69.1 | 58.3 |
| 298 | 551.5 | 344.5 | 386.7 | 324.7 | 241.8 | 269 | 394.7 |
| 299 | 1468.8 | 1771.8 | 787.5 | 1048 | 935.5 | 572.9 | 948.9 |
| 300 | 817.3 | 680.9 | 461.3 | 248.2 | 137.3 | 294.2 | 748.4 |
| 301 | 608.4 | 1624.7 | 1490.7 | 3382.6 | 4444 | 1930.7 | 1769 |
| 302 | 10.4 | 26.6 | 30.4 | 33.2 | 26.3 | 35.7 | 24.2 |
| 303 | 710.1 | 705.1 | 1706.6 | 859.3 | 577.5 | 788.3 | 425.1 |
| 304 | 95.7 | 466.8 | 190.4 | 187.2 | 124.8 | 202.8 | 143.5 |
| 305 | 157.1 | 529.4 | 493.4 | 795.6 | 163.1 | 69.8 | 249 |
| 306 | 131.8 | 108.5 | 180.6 | 143.8 | 154.4 | 173 | 206 |
| 307 | 191.4 | 207.2 | 84.5 | 181.7 | 133.4 | 205.1 | 178.9 |
| 308 | 2703.4 | 1485.8 | 1302 | 2184.2 | 756.3 | 1330.1 | 1074.7 |
| 310 | 549.2 | 417.5 | 612 | 811.3 | 723.1 | 576 | 409.8 |
| 311 | 145 | 132 | 126 | 159.1 | 101.9 | 148.1 | 113.9 |
| 312 | 1216.9 | 574.9 | 992.1 | 892.8 | 612.7 | 695.2 | 1340.7 |
| 313 | 307.7 | 190.1 | 158.9 | 201.8 | 115.6 | 112.7 | 1437.5 |
| 314 | 416.9 | 725.7 | 134.8 | 157 | 168.8 | 428.1 | 448.6 |
| 315 | 192.5 | 412.2 | 496 | 467.2 | 366.2 | 506.8 | 341.4 |
| 316 | 444 | 470.1 | 95.3 | 286 | 281.8 | 131.4 | 291.2 |
| 317 | 157.9 | 142 | 150.3 | 197.9 | 191.9 | 177.2 | 201.1 |
| 318 | 140.5 | 334.7 | 56.9 | 29.1 | 73.1 | 87 | 78.1 |
| 319 | 706.9 | 280.3 | 127.7 | 267.6 | 70.7 | 164.5 | 199.4 |
| 320 | 535.8 | 590.3 | 887.9 | 568 | 592.8 | 742.2 | 577.9 |
| 321 | 340.3 | 326.5 | 372 | 793.8 | 460.1 | 414.9 | 375.2 |
| 322 | 352.2 | 258.3 | 185.4 | 237.2 | 248.6 | 152.6 | 280.9 |
| 323 | 2455.7 | 4246.4 | 3485.2 | 2786.2 | 4469.1 | 2754.2 | 4942.2 |
| 324 | 348.9 | 411 | 169.2 | 70 | 73 | 87.9 | 460 |
| 325 | 449.5 | 519.2 | 168 | 216.7 | 282.5 | 299.4 | 469.4 |
| 326 | 1603.6 | 3167 | 3571.4 | 404.9 | 4260.9 | 3099.9 | 1692.6 |
| 327 | 26.8 | 44 | 10.3 | 12.2 | 25.7 | 20.6 | 8.2 |
| 328 | 277.9 | 499.5 | 114.4 | 194 | 624.6 | 445.4 | 617.5 |
| 329 | 63.1 | 51.9 | 64 | 54.1 | 56.3 | 67.2 | 81.9 |
| 330 | 26.8 | 398.3 | 51.1 | 38.3 | 53.4 | 44.1 | 28.4 |
| 331 | 353.6 | 211.8 | 246.9 | 326.3 | 313.7 | 256.2 | 346.2 |
| 333 | 628.2 | 817.1 | 534.6 | 764.7 | 963.2 | 1039.8 | 993.5 |
| 334 | 129 | 131.6 | 121.3 | 127.9 | 171.5 | 135.9 | 210.2 |
| 335 | 61.5 | 83.3 | 276.3 | 550.9 | 108.1 | 127.9 | 116.4 |
| 336 | 877.3 | 835 | 262.7 | 397.8 | 457.2 | 330 | 598.7 |
| 337 | 119 | 244.5 | 349.6 | 426.7 | 114.8 | 364.1 | 225.7 |
| 338 | 213.7 | 307.5 | 152.1 | 190 | 160 | 264.1 | 213.2 |
| 339 | 337.9 | 298.3 | 253.4 | 278.6 | 421.1 | 490.3 | 476.5 |
| 340 | 161.4 | 161 | 248.4 | 316.2 | 277.8 | 273.6 | 290.1 |
| 341 | 575.9 | 645.8 | 726.6 | 782.5 | 1057.6 | 767.6 | 465.1 |
| 343 | 1203 | 450.3 | 740.9 | 103.8 | 137.1 | 178 | 105 |
| 344 | 1275 | 1111.4 | 1819.2 | 1393.5 | 1260.3 | 1521.1 | 1289.7 |
| 345 | 164.6 | 211.9 | 210.1 | 208.7 | 288.4 | 221.3 | 290.7 |
| 347 | 2603 | 3049.5 | 1135.9 | 1212.8 | 2982.6 | 3471.6 | 2440.3 |
| 348 | 4636 | 4968.1 | 2088.3 | 2517.8 | 4998.7 | 6143.9 | 5642.9 |
| 349 | 231.2 | 321.5 | 329.2 | 238.9 | 199 | 275.7 | 273.9 |
| 350 | 306.8 | 357 | 165.3 | 139.9 | 214.3 | 201.7 | 315.7 |
| 351 | 661.6 | 248.9 | 70.2 | 75.7 | 64.2 | 140 | 76.9 |
| 352 | 228.8 | 337.7 | 313.8 | 812.7 | 340.3 | 238.1 | 322 |
| 353 | 268 | 118.5 | 158.9 | 211.1 | 171 | 284.3 | 124.5 |

3k

| SEQ ID NO: | 967TT | 968TT | 969TT | 970TT | 982TT | 983TT |
|---|---|---|---|---|---|---|
| 354 | 23.2 | 55.9 | 169.3 | 22.6 | 1.2 | 136.2 |
| 355 | 28.5 | 50.2 | 1052.4 | 81.6 | 25.9 | 96.4 |
| 356 | 625.8 | 410.2 | 2722.4 | 190.1 | 528.5 | 449.5 |
| 357 | 301.6 | 385.5 | 990 | 299.7 | 781 | 321.6 |
| 358 | 855.6 | 468.3 | 570.2 | 419.9 | 530.5 | 768 |
| 359 | 336.5 | 327.4 | 464.6 | 420.5 | 326.9 | 556.2 |
| 362 | 247.8 | 386.1 | 248.5 | 248 | 355.4 | 570.5 |
| 360 | 219.2 | 183.9 | 501.1 | 198.9 | 170.3 | 376.9 |
| 361 | 248.2 | 544 | 730.9 | 108.3 | 746.6 | 231.5 |
| 363 | 716.9 | 541.2 | 438.2 | 3964.4 | 373.4 | 824.2 |
| 1 | 469.7 | 405.7 | 1234.4 | 133.8 | 970 | 527.9 |
| 2 | 135.1 | 2759.1 | 3994.4 | 239.3 | 3662.3 | 264.1 |
| 7 | 1.3 | 402.8 | 129 | 94.8 | 1127.5 | 460.2 |
| 8 | 1162.1 | 811.3 | 967.4 | 854.4 | 644.1 | 915.3 |
| 9 | 2702.9 | 1018.8 | 4839.3 | 217.3 | 1823.6 | 997.2 |
| 10 | 190.7 | 504.6 | 237.6 | 195.3 | 126.1 | 271.3 |
| 11 | 1104.8 | 1435.3 | 2566.4 | 297.7 | 275.4 | 422.7 |
| 13 | 198.3 | 136 | 54.3 | 73.1 | 68.5 | 266.9 |
| 14 | 545.3 | 572.6 | 232.1 | 73.2 | 69.4 | 676 |
| 15 | 82.9 | 465.9 | 409.7 | 155.7 | 537.1 | 134.5 |
| 16 | 981.5 | 987.6 | 1149.6 | 167.1 | 888.7 | 1443.1 |
| 17 | 178.5 | 639 | 1677.1 | 125.2 | 2064.5 | 437.9 |
| 19 | 289.1 | 542.1 | 212.7 | 359 | 106.4 | 291.4 |
| 20 | 1.1 | 118.7 | 73.8 | 1.2 | 19.5 | 6.1 |
| 21 | 928.1 | 1108.3 | 1144.3 | 77 | 10.6 | 499.2 |
| 22 | 1063.2 | 3119.6 | 4358 | 872.9 | 8269.8 | 577.8 |
| 23 | 1.2 | 379.9 | 35.2 | 1.2 | 1.1 | 61.4 |
| 24 | 73.7 | 59 | 226.7 | 57.2 | 297.5 | 65.5 |
| 26 | 117.4 | 453.2 | 143.8 | 58.4 | 89 | 440 |
| 27 | 1699.9 | 830.8 | 811.4 | 403.5 | 511.2 | 509.3 |
| 29 | 594.6 | 288 | 325.3 | 378 | 112.4 | 982.9 |
| 30 | 86.9 | 82.7 | 124.5 | 10.9 | 45 | 97 |
| 31 | 1573.7 | 38.8 | 497.9 | 471.5 | 34.3 | 72.6 |
| 33 | 441.8 | 872.9 | 1130.8 | 75.9 | 411.7 | 352 |
| 34 | 1018.8 | 2164.1 | 2701.3 | 2309.9 | 2634.9 | 4374.3 |
| 35 | 99.6 | 70.4 | 393.2 | 80.2 | 13.2 | 133.7 |
| 36 | 167.8 | 137.3 | 152.5 | 203.8 | 1201.5 | 111.3 |
| 37 | 329.9 | 181.7 | 190.5 | 777.4 | 172.2 | 464.8 |
| 38 | 240.2 | 1359.2 | 1110.5 | 89.7 | 1069.5 | 51.1 |
| 40 | 666.4 | 451.5 | 462.6 | 593.8 | 349.6 | 703.8 |
| 41 | 180.9 | 1696.6 | 333.6 | 178.9 | 730 | 231.9 |
| 42 | 176.5 | 403.8 | 214 | 306.2 | 308.2 | 287.7 |
| 43 | 821.9 | 483.9 | 321 | 1489 | 232.8 | 1352.9 |
| 44 | 467.5 | 380 | 471.5 | 555.7 | 360.3 | 455 |
| 45 | 770.8 | 434.4 | 558.1 | 1817 | 1071 | 1373.8 |
| 46 | 411.4 | 330.8 | 255 | 409.7 | 273.6 | 401.2 |
| 47 | 166.6 | 296.7 | 247.1 | 277.4 | 321.6 | 130.9 |
| 48 | 1.2 | 116.9 | 1.2 | 69 | 28.9 | 111 |
| 49 | 627.1 | 965.5 | 130.2 | 225.8 | 251.8 | 772.3 |
| 50 | 142.5 | 216.3 | 192.3 | 15.1 | 77.1 | 161.5 |
| 51 | 57.4 | 149.4 | 38.2 | 2101.5 | 1490.9 | 1190.6 |
| 52 | 308.7 | 413.6 | 298.7 | 307.9 | 217.7 | 234.6 |
| 53 | 84.9 | 100.2 | 159.9 | 93.3 | 102 | 217.6 |
| 54 | 870.3 | 607.4 | 345.8 | 269.3 | 669.6 | 529 |
| 55 | 161.6 | 94.8 | 98.6 | 115.2 | 110.3 | 144.3 |
| 56 | 106.7 | 36.5 | 54 | 42.1 | 150.1 | 33.6 |
| 57 | 343.8 | 1228.1 | 103 | 770.3 | 171.3 | 966.7 |
| 58 | 392.8 | 1366.3 | 238.3 | 1256 | 263.5 | 1149.6 |
| 59 | 605.2 | 1677.6 | 2094 | 285.7 | 1088 | 1273.8 |
| 60 | 202.7 | 198 | 164.7 | 124.8 | 168.1 | 155.5 |
| 61 | 542.2 | 245.6 | 124.9 | 288 | 103.9 | 201.2 |
| 62 | 1650.5 | 7509.1 | 3612.1 | 1170.1 | 318.8 | 9459.8 |
| 63 | 259.6 | 202.4 | 365.9 | 187.3 | 388.3 | 316.8 |
| 64 | 540.3 | 166.5 | 122.8 | 1276.6 | 123.7 | 1611 |
| 65 | 88.4 | 78.4 | 66.1 | 90.1 | 66.4 | 98.4 |
| 66 | 351.3 | 424.5 | 843.2 | 182.5 | 1223.8 | 103.2 |
| 67 | 8409.7 | 26223.6 | 34005.1 | 9041.4 | 32601.5 | 3094.7 |
| 68 | 2810.9 | 3260.1 | 2929.3 | 4961.6 | 4818.8 | 513.1 |
| 69 | 11767.3 | 6789.1 | 10957 | 11079.3 | 10388.2 | 3855.9 |
| 70 | 2845.6 | 1603 | 1889.8 | 8120.7 | 1927.8 | 1628.7 |
| 71 | 268.6 | 92.8 | 207.5 | 74.8 | 92.7 | 322.2 |
| 72 | 139.6 | 120.7 | 919.8 | 113.4 | 282.2 | 275.2 |
| 73 | 237.7 | 278.3 | 786.2 | 192.5 | 388.7 | 263.9 |
| 75 | 91.9 | 141.7 | 446.1 | 57.6 | 157.7 | 455.9 |
| 76 | 554.2 | 24.1 | 14.5 | 498.3 | 903.9 | 2000.7 |
| 77 | 2410.2 | 1463.1 | 4948 | 4569.6 | 2755.1 | 5975.3 |
| 78 | 315.7 | 431.5 | 516.1 | 324.3 | 1188.7 | 81 |
| 79 | 162.4 | 146 | 171.7 | 204.3 | 106.5 | 265.2 |
| 80 | 100.7 | 790.8 | 491.3 | 95.1 | 372.8 | 933.3 |
| 81 | 2776.2 | 78.6 | 226.5 | 49.7 | 116.4 | 232.7 |
| 82 | 1230.5 | 231.4 | 120 | 1479.5 | 468.6 | 3720.2 |
| 84 | 308.9 | 961.7 | 101 | 78.7 | 204.4 | 653.1 |
| 85 | 350.3 | 125.3 | 159.1 | 154.7 | 129 | 484.4 |
| 86 | 91 | 85.7 | 73.9 | 126.3 | 52.9 | 189.6 |
| 87 | 296.2 | 320.3 | 1151.2 | 607.3 | 338 | 598.1 |
| 88 | 1909 | 1350 | 5707.2 | 1415.8 | 10923.2 | 860.8 |
| 89 | 206.8 | 203.5 | 145.5 | 160.9 | 154.6 | 303.9 |
| 90 | 95.9 | 93.9 | 95.8 | 99.7 | 108.7 | 108.2 |
| 91 | 362 | 346.8 | 219.6 | 491.8 | 78.8 | 550.5 |
| 92 | 3647.7 | 833.5 | 7305.9 | 83.4 | 3870.6 | 3178.4 |
| 93 | 158.2 | 341.1 | 321.3 | 94.2 | 217.3 | 459 |
| 94 | 199.5 | 488 | 854.3 | 71.2 | 251.2 | 114.4 |
| 95 | 90.1 | 99 | 154.9 | 131 | 686.8 | 242.9 |
| 96 | 152.2 | 124.4 | 172.1 | 130.6 | 192.9 | 111.2 |
| 97 | 251.1 | 342.4 | 429.8 | 95.2 | 143.5 | 354.9 |
| 98 | 240.9 | 37.1 | 30.6 | 67.9 | 14.8 | 257.9 |
| 99 | 321.4 | 281.7 | 244.4 | 316 | 192.3 | 311.7 |
| 100 | 288.5 | 356.2 | 13918.1 | 777.1 | 7145.1 | 1884.5 |
| 101 | 158.2 | 192.6 | 116.4 | 133.6 | 117.1 | 224.1 |
| 102 | 353.9 | 153.6 | 142.8 | 363.4 | 159 | 275.5 |
| 103 | 351.3 | 300.2 | 333.9 | 367.9 | 291.8 | 152.5 |
| 104 | 274.1 | 45.1 | 405.3 | 200.1 | 1282.8 | 873.3 |
| 105 | 449.3 | 51.2 | 538 | 259.7 | 701.6 | 1037.6 |
| 106 | 297.6 | 32.8 | 390.4 | 273.1 | 945.8 | 933.9 |
| 107 | 169.5 | 176.1 | 188.6 | 213.6 | 121.6 | 426.3 |
| 108 | 160.8 | 676.4 | 409.7 | 356.4 | 505.9 | 328.9 |
| 109 | 3423.5 | 49.2 | 4125.3 | 130.2 | 29.4 | 301.6 |
| 110 | 5966.7 | 10.7 | 4569.2 | 200.4 | 25.8 | 956.3 |
| 111 | 253.1 | 609.4 | 71.4 | 158.5 | 134.5 | 223.5 |
| 112 | 1062.8 | 94.2 | 773.3 | 1195.8 | 507.3 | 1.2 |
| 113 | 221.5 | 123.7 | 67.4 | 210.1 | 274.1 | 7.7 |
| 114 | 123.6 | 108.3 | 382.3 | 250.2 | 272.6 | 105.3 |
| 115 | 397.9 | 320.1 | 369.8 | 242.8 | 282.1 | 292 |
| 116 | 279.4 | 395 | 237.5 | 165.5 | 184.5 | 311.1 |
| 117 | 200.4 | 1406.9 | 3545.8 | 607.8 | 2324.7 | 349.8 |
| 118 | 336.5 | 116.3 | 86.4 | 5808.9 | 64.9 | 2556.4 |
| 119 | 365.6 | 76.7 | 50.2 | 122.9 | 83.3 | 80.8 |
| 120 | 48.1 | 344 | 49.8 | 99.6 | 3044.7 | 110.5 |
| 121 | 259.6 | 336.7 | 403.1 | 87.6 | 1213.5 | 143.5 |
| 122 | 292.8 | 185.3 | 455.1 | 158.5 | 34.9 | 507.8 |
| 123 | 139.7 | 152.8 | 81.1 | 352.1 | 126 | 366.5 |
| 124 | 172.2 | 143.6 | 148.2 | 5160.7 | 124 | 172 |
| 125 | 1555.3 | 978.9 | 878.3 | 1620.9 | 867.1 | 1453.5 |
| 126 | 87.5 | 59.3 | 1558.6 | 257.7 | 1842.3 | 258.4 |
| 127 | 140.3 | 83.5 | 117.6 | 156 | 105 | 192 |
| 128 | 320 | 249.4 | 167.1 | 365.5 | 265.9 | 418.6 |
| 129 | 189.6 | 189.4 | 161.7 | 86 | 198.2 | 224.2 |
| 130 | 122.9 | 84.1 | 71.2 | 115.6 | 87.4 | 72 |
| 131 | 140.1 | 39.7 | 182.4 | 236.8 | 71.2 | 535 |
| 132 | 243.2 | 184 | 208.8 | 237.5 | 218.6 | 256.7 |
| 133 | 174.8 | 338.7 | 113.2 | 82.8 | 67.1 | 321.5 |
| 134 | 182.1 | 160.9 | 497.9 | 87.7 | 278.3 | 109.1 |
| 135 | 286.8 | 205.4 | 723.3 | 307 | 241.7 | 336.9 |
| 138 | 146.4 | 136.3 | 144.8 | 124 | 114.4 | 176.2 |
| 139 | 202.8 | 189.9 | 152 | 72.1 | 169.5 | 132.4 |
| 140 | 18.2 | 1010.6 | 2927.9 | 23.6 | 1469.1 | 1.5 |
| 141 | 178.6 | 283.5 | 2257.9 | 3.4 | 1606.2 | 310 |
| 144 | 6356.1 | 261.5 | 311.4 | 419.2 | 349.3 | 527.5 |
| 145 | 298.7 | 186.1 | 180.4 | 255.9 | 190 | 279.2 |
| 146 | 272 | 229.4 | 195.1 | 295.7 | 196 | 343.1 |
| 147 | 42.5 | 44.6 | 35.8 | 58.6 | 44.5 | 29.3 |
| 148 | 357.4 | 192.1 | 831.9 | 156.5 | 464.4 | 1068.9 |
| 149 | 272.6 | 184 | 1807.9 | 33 | 284.7 | 171 |
| 150 | 182.2 | 502.5 | 356 | 148.7 | 526.3 | 948.6 |
| 151 | 265.1 | 174.8 | 181.4 | 138.7 | 143.7 | 162.4 |
| 153 | 132.4 | 185.7 | 157.8 | 103.5 | 113.3 | 218.6 |
| 154 | 145.6 | 46.6 | 390.9 | 121.8 | 68.4 | 160.8 |
| 155 | 226.6 | 139.4 | 130.3 | 224.6 | 96.3 | 238.7 |
| 156 | 81.5 | 50.5 | 20.5 | 169.1 | 107.5 | 88.7 |
| 157 | 226.7 | 170.6 | 136.4 | 131.5 | 112.2 | 189.1 |
| 158 | 236.4 | 237.1 | 1.1 | 202.4 | 39.1 | 650.6 |
| 159 | 1520.9 | 4126.2 | 3171.7 | 755.4 | 4600.4 | 3258.9 |
| 161 | 31.6 | 790.1 | 3.5 | 12.1 | 2.5 | 1.3 |
| 162 | 62.1 | 71.5 | 45.6 | 40.8 | 21.6 | 57.1 |
| 164 | 391.7 | 235.7 | 1236.8 | 91.4 | 215.8 | 40.9 |
| 166 | 4422.1 | 4880.3 | 7064.9 | 2557.6 | 3776.6 | 8467.5 |
| 167 | 544.2 | 1623 | 684.2 | 1035.6 | 3875 | 2178.2 |
| 168 | 2410.7 | 82.3 | 985.8 | 19.1 | 523.6 | 43 |
| 169 | 485.1 | 1840.5 | 7446.2 | 1266.9 | 1301.4 | 2686.1 |
| 170 | 971.7 | 643 | 1478.2 | 166.9 | 2916.1 | 760.7 |
| 171 | 38.2 | 233.9 | 733 | 1.2 | 1.2 | 503.5 |
| 172 | 492.3 | 472 | 656 | 483.1 | 510.4 | 757.2 |
| 173 | 542.8 | 375.8 | 794.6 | 114.4 | 595 | 647.8 |
| 176 | 10.6 | 32.1 | 1.2 | 69.1 | 991.6 | 1.2 |
| 177 | 224.2 | 1237.4 | 236.6 | 1044.6 | 789.8 | 993.8 |
| 178 | 1934.6 | 409 | 470.7 | 650.5 | 1387 | 941.3 |
| 179 | 145.3 | 412.9 | 60.7 | 161.2 | 85.7 | 245.7 |
| 180 | 161 | 92.4 | 67.4 | 128.2 | 94.3 | 131.7 |
| 181 | 9117.6 | 8152.5 | 11035.8 | 13798.5 | 15093.4 | 8202.9 |
| 182 | 189.4 | 445.2 | 574.2 | 128.1 | 524.1 | 227.5 |
| 183 | 1.1 | 64.7 | 11.7 | 1.2 | 1.1 | 72.1 |
| 184 | 215 | 541.8 | 290 | 167.9 | 286.9 | 190 |
| 185 | 973.9 | 711.7 | 1014 | 679.8 | 914.9 | 1030.3 |
| 186 | 377 | 560.6 | 395.4 | 1755.4 | 302.8 | 732.2 |
| 187 | 53.8 | 67.3 | 41.8 | 81.4 | 33.1 | 104.6 |
| 188 | 43.6 | 33.7 | 103.2 | 61.3 | 1218.5 | 94.9 |
| 189 | 86.4 | 37.9 | 69.2 | 84.5 | 695.6 | 108.4 |
| 190 | 407.6 | 372.7 | 283.5 | 135.6 | 90.2 | 162.9 |
| 191 | 359.8 | 2605 | 2070.6 | 919.3 | 2961.2 | 4325.2 |
| 192 | 856.8 | 383.6 | 183.3 | 146.2 | 69.3 | 827.1 |
| 193 | 75.8 | 1538.4 | 2686.5 | 638.6 | 2367.3 | 33.3 |
| 194 | 121.6 | 135.5 | 230 | 28.4 | 238.5 | 127.6 |
| 195 | 159.5 | 372.6 | 180 | 614.6 | 333.1 | 355.6 |
| 196 | 7404.9 | 4791.5 | 952.5 | 7933.6 | 7823.2 | 8113.2 |
| 197 | 133.6 | 44.6 | 130.5 | 218.5 | 71.7 | 113.9 |
| 198 | 129.4 | 323.2 | 103.3 | 138.9 | 56.8 | 123.9 |
| 199 | 105.7 | 36 | 1584.1 | 2.7 | 42.7 | 162 |
| 200 | 251.1 | 102.9 | 160.6 | 270.3 | 374.1 | 170.5 |
| 201 | 70.3 | 49.7 | 172.9 | 58.1 | 1.6 | 125.6 |
| 203 | 155.2 | 84.1 | 172.2 | 202.8 | 393.4 | 343.4 |
| 204 | 258.9 | 711.5 | 1093.8 | 268.3 | 710.3 | 515.6 |
| 205 | 1215.1 | 1501.8 | 7081.6 | 570.2 | 5009.6 | 1308.5 |
| 206 | 328 | 173 | 298.2 | 310.4 | 185.1 | 597.2 |
| 207 | 172.9 | 68.6 | 1428.1 | 46.5 | 2541.6 | 144.3 |
| 208 | 1492.3 | 7 | 24.8 | 10.1 | 783.8 | 45.3 |
| 209 | 667.1 | 1776.2 | 311.6 | 1203.9 | 2745 | 1499.4 |
| 211 | 1193.2 | 2651.6 | 12245 | 343.1 | 25458 | 17479.9 |
| 212 | 837.5 | 433 | 245 | 2353.6 | 512.9 | 728.8 |
| 213 | 203.3 | 87 | 71.4 | 3629.9 | 93.5 | 468.6 |
| 215 | 176 | 71.1 | 554.7 | 57.5 | 3381.9 | 202 |
| 216 | 611.8 | 308.3 | 915.4 | 490.4 | 896.8 | 690.5 |
| 217 | 118.5 | 146.7 | 191.2 | 121 | 293.9 | 120.7 |
| 218 | 252.2 | 466.5 | 274.1 | 124.9 | 335.3 | 428.6 |
| 220 | 125.2 | 75.4 | 108.2 | 10561 | 77.9 | 131.8 |
| 221 | 139.2 | 264.1 | 452 | 146.5 | 699.3 | 143.9 |
| 223 | 415.6 | 845.6 | 362.8 | 477.7 | 165.6 | 689.8 |
| 227 | 314.8 | 2480.3 | 1008.1 | 182.6 | 1091.2 | 223.2 |
| 228 | 432.9 | 294.9 | 213.2 | 461.6 | 568.4 | 517.8 |
| 229 | 143.7 | 774 | 171.7 | 1810.6 | 305 | 446.6 |
| 230 | 179 | 63.3 | 79.4 | 202.4 | 63.6 | 37.6 |
| 231 | 136.2 | 113.7 | 127 | 180.7 | 207.4 | 205 |
| 232 | 45.3 | 272.3 | 86.5 | 8.9 | 63.8 | 337.4 |
| 233 | 1483 | 4545.5 | 6134.3 | 1579.1 | 7762.7 | 3649.3 |
| 235 | 85.7 | 443.4 | 423.8 | 66.6 | 211.8 | 323.6 |
| 236 | 110.2 | 202.4 | 106.8 | 196.1 | 123.9 | 257.5 |
| 237 | 1495.9 | 564.8 | 1641 | 1057.2 | 1533.6 | 704.4 |
| 238 | 744.2 | 349.2 | 899.4 | 244.1 | 1354 | 349.4 |
| 239 | 186.3 | 100.4 | 196.3 | 93 | 124 | 153.1 |
| 240 | 195.9 | 71.5 | 727.2 | 65.8 | 131.3 | 148 |
| 241 | 237.2 | 205.2 | 1034.3 | 94.1 | 300.5 | 145.6 |
| 242 | 5003.3 | 13867.1 | 2129.7 | 15742.7 | 4086.9 | 11985.6 |
| 243 | 803.1 | 288.9 | 174.5 | 134.2 | 226.2 | 143.1 |
| 244 | 97.8 | 194.6 | 282.9 | 8.3 | 256.1 | 109.7 |
| 246 | 359 | 276.8 | 388.3 | 169.2 | 115.4 | 448.4 |
| 247 | 170.8 | 140.7 | 109.7 | 303.9 | 118.1 | 139.1 |
| 248 | 245.6 | 109.7 | 217.3 | 113.2 | 196.9 | 135.7 |
| 249 | 96.3 | 216.6 | 223.8 | 135.9 | 48.3 | 585.6 |
| 251 | 187.9 | 61.1 | 115.5 | 59.8 | 112.5 | 93.9 |
| 253 | 260.8 | 275.7 | 327.1 | 165.6 | 468.1 | 240.6 |
| 254 | 63.2 | 64.3 | 465.3 | 121 | 2267.5 | 15.9 |
| 255 | 1923 | 352.4 | 648.8 | 811.1 | 1499.8 | 1126.3 |
| 256 | 563.4 | 448.2 | 228.9 | 490.4 | 82.7 | 573.9 |
| 257 | 378.8 | 648.4 | 475.3 | 161.3 | 185.7 | 145.8 |
| 258 | 582.1 | 257.2 | 5241.4 | 168 | 40.2 | 1024 |
| 259 | 30 | 73.9 | 532.4 | 28.9 | 44.5 | 13.3 |
| 260 | 209.5 | 228.1 | 128.5 | 237.3 | 114 | 618.7 |
| 261 | 135.7 | 834.3 | 320.6 | 115.8 | 259.6 | 134.1 |
| 263 | 320.6 | 673.5 | 537 | 470.6 | 473.9 | 2280.3 |
| 263 | 316.2 | 103.4 | 161.5 | 369.4 | 123.6 | 137.2 |
| 265 | 106.3 | 287.4 | 601.3 | 317.4 | 934.8 | 119.6 |
| 266 | 216.8 | 145.8 | 179.8 | 955 | 181.8 | 470.8 |
| 256 | 147.4 | 89.7 | 97.7 | 81.8 | 124.2 | 119.5 |
| 268 | 304.8 | 19.7 | 60.1 | 175.6 | 2929.8 | 220.9 |
| 269 | 61.3 | 84.9 | 35 | 57.5 | 38 | 158.7 |
| 270 | 276.1 | 144.9 | 183.1 | 1394.4 | 176.9 | 726.2 |
| 271 | 139.7 | 191.4 | 249.6 | 243.4 | 292.7 | 190 |
| 272 | 1068.5 | 485.1 | 605.5 | 722 | 403 | 558.4 |
| 273 | 145.8 | 421.9 | 4104.1 | 1.3 | 1705.7 | 34.7 |
| 274 | 178.2 | 517.1 | 426.4 | 468.2 | 206.6 | 681.6 |
| 275 | 271.4 | 219.3 | 164 | 299.8 | 209.9 | 428.2 |
| 276 | 396.3 | 3030.8 | 977.3 | 188 | 1246.2 | 307.4 |
| 277 | 228.6 | 153.3 | 181.7 | 212.1 | 199 | 244.3 |
| 278 | 50.3 | 1164.1 | 1019 | 52 | 88.6 | 105.7 |
| 279 | 985.7 | 1407 | 2129.1 | 232.5 | 2794.6 | 1002 |
| 280 | 1510.7 | 2192.5 | 6373 | 286.6 | 3920.2 | 1434.5 |
| 281 | 24.5 | 1.2 | 32.8 | 20.6 | 66.1 | 40.3 |
| 282 | 4703.6 | 248.3 | 312.9 | 291 | 241.6 | 404.4 |
| 283 | 413.8 | 290.4 | 220 | 660.8 | 232 | 552.8 |
| 284 | 106.4 | 84.7 | 78.8 | 140.9 | 65.1 | 99.7 |
| 285 | 148.4 | 92.7 | 162.5 | 143.5 | 104.4 | 219 |
| 286 | 129 | 10.1 | 1134.4 | 36.1 | 1.3 | 510.6 |
| 287 | 127.8 | 111.9 | 67.9 | 468.2 | 86.5 | 147.5 |
| 288 | 267.1 | 129.5 | 153.3 | 256.4 | 171.7 | 231.2 |
| 289 | 91.1 | 390.9 | 271 | 465.5 | 214.2 | 1306.3 |
| 291 | 133.2 | 72.5 | 78.4 | 5.9 | 133.9 | 35.1 |
| 292 | 75.7 | 25.7 | 293.3 | 71.5 | 18.4 | 104.7 |
| 293 | 438 | 86.4 | 72.7 | 37.3 | 77.1 | 371 |
| 295 | 244.8 | 581.6 | 30.1 | 979.1 | 569.4 | 507.9 |
| 296 | 1349.4 | 504 | 1210.8 | 671.3 | 716.7 | 813.5 |
| 297 | 64.9 | 45.4 | 49.4 | 853.9 | 62 | 98.3 |
| 298 | 186.2 | 307.3 | 416.8 | 311.1 | 232.4 | 211.4 |
| 299 | 306.5 | 444.4 | 962 | 703.8 | 375.8 | 401.4 |
| 300 | 420.6 | 101.7 | 176.4 | 125.4 | 475.3 | 235.4 |
| 301 | 507.2 | 2222 | 808.6 | 528.9 | 1281.3 | 340.3 |
| 302 | 29.2 | 22.3 | 23.2 | 31.4 | 9.5 | 10.1 |
| 303 | 457.4 | 993.6 | 1360.4 | 930 | 836.6 | 1031.2 |
| 304 | 262.8 | 452.7 | 227.3 | 209.2 | 208.1 | 397.9 |
| 305 | 531.2 | 6335.1 | 145.3 | 300 | 1625.9 | 5308.7 |
| 306 | 262.8 | 287.6 | 155.9 | 258.3 | 126 | 317.5 |
| 307 | 150.7 | 121.6 | 150 | 167.9 | 118.6 | 139.3 |
| 308 | 1991.2 | 756 | 1163.4 | 4741.6 | 1375.7 | 4290.1 |
| 310 | 950.2 | 194.6 | 1093.2 | 1092.8 | 219.2 | 640.7 |
| 311 | 64.6 | 25.1 | 144.2 | 55.8 | 44.7 | 73.8 |
| 312 | 797.1 | 35.8 | 1289.1 | 5881.4 | 362.4 | 1192 |
| 313 | 542.5 | 719.4 | 122 | 119.1 | 139.3 | 161.9 |
| 314 | 938.2 | 209.6 | 551.3 | 68.6 | 147.2 | 345 |
| 315 | 123.7 | 274.1 | 155.2 | 218.6 | 299.1 | 52.8 |
| 316 | 289.8 | 413.1 | 415.9 | 205.6 | 84.3 | 704.2 |
| 317 | 202.4 | 156.1 | 133.7 | 210.8 | 138.1 | 206.3 |
| 318 | 126.8 | 259.1 | 109.3 | 26.5 | 16.2 | 157.6 |
| 319 | 362 | 168.9 | 161.6 | 713.5 | 195.9 | 1566.2 |
| 320 | 503.3 | 277.3 | 356.8 | 1176.5 | 487.2 | 297.3 |
| 321 | 218.1 | 470.4 | 426.1 | 337.2 | 517.9 | 711.3 |
| 322 | 375.3 | 251.1 | 292.4 | 504 | 186.1 | 609.6 |
| 323 | 553 | 949.4 | 2829.3 | 768.9 | 4431.8 | 1365.8 |
| 324 | 179.2 | 52.7 | 227.9 | 81.1 | 81.7 | 41.1 |
| 325 | 335.3 | 242.7 | 242.8 | 170.7 | 198.5 | 313.4 |
| 326 | 1260.9 | 2604.5 | 4986.5 | 584.6 | 5373.5 | 643.7 |
| 327 | 29.1 | 14.2 | 26.9 | 21.4 | 61.9 | 2.8 |
| 328 | 58.8 | 218.5 | 113.1 | 63.9 | 223.4 | 73.3 |
| 329 | 191.7 | 61.4 | 40.3 | 147.8 | 62.3 | 144.2 |
| 330 | 134.1 | 100.9 | 58.4 | 36 | 18.7 | 37.3 |
| 331 | 445.5 | 369.7 | 271.4 | 981.9 | 227.2 | 893.2 |
| 333 | 76.9 | 473 | 115.9 | 230.1 | 287.1 | 484.1 |
| 334 | 172.8 | 136 | 152.4 | 100.5 | 143.3 | 120.5 |
| 335 | 122.9 | 126.9 | 113.2 | 212.1 | 846.9 | 658.3 |
| 336 | 308.8 | 716 | 987.8 | 236.4 | 665.2 | 600.4 |
| 337 | 43.9 | 98.3 | 1139.9 | 53.3 | 129.7 | 270.9 |
| 338 | 290.4 | 144.6 | 420.3 | 105.8 | 134.4 | 220.2 |
| 339 | 338.2 | 255.3 | 217.6 | 483.7 | 351.7 | 459.4 |
| 340 | 241.7 | 256.2 | 235.6 | 263.3 | 247.8 | 313.8 |
| 341 | 693.6 | 1174.2 | 706.5 | 545.1 | 590.9 | 506.5 |
| 343 | 2675.2 | 997.1 | 235.2 | 5179.8 | 686.5 | 3885.2 |
| 344 | 1600.8 | 650.5 | 866.5 | 3374.5 | 937.5 | 785.9 |
| 345 | 371 | 324 | 225.2 | 332.3 | 208.4 | 349.4 |
| 347 | 930.2 | 70.2 | 922.3 | 734.3 | 7238.6 | 705.8 |
| 348 | 2298.3 | 37.7 | 1946.1 | 988.1 | 10651.2 | 2867.2 |
| 349 | 208.2 | 402.1 | 215.3 | 174.1 | 296.4 | 343.8 |
| 350 | 2.9 | 34.4 | 518.4 | 27.6 | 143.5 | 191.8 |
| 351 | 188.2 | 69.4 | 94.8 | 40.4 | 46.1 | 744.7 |
| 352 | 269.7 | 230.4 | 500.5 | 390.8 | 298.9 | 319.5 |
| 353 | 757.9 | 154.1 | 248.3 | 481.8 | 1304.4 | 432.8 |

[0089] TABLE 4
4-Gene signature performance in 98 training samples

| | Tumor | Benign |
|---|---|---|
| Positive | 48 | 18 |
| Negative | 4 | 28 |

| | |
|---|---|
| Sensitivity | 92% (0.82, 0.97) |
| Specificity | 61% (0.46, 0.74) |

B. Signature Identification using Linear Discrimination Analysis

[0090] We used a forward selection process that adds one gene at a time until the posterior error as evaluated by a linear discriminator is less than or equal to 0.1. A four-gene signature was discovered using this approach with the 322 genes. The identities of these 4 genes are listed in Table 5 and 16 and their chip data are shown in Tables 6 and 7.

TABLE 5
4-Gene Signature

| SEQ ID NO: | Gene Name |
|---|---|
| 354 | Chemokine (C—C motif) ligand 18 (pulmonary and |
| | activation-regulated) |
| 199 | Pulmonary surfactant-associated protein B (SP-B) |
| 207 | K+ channel beta subunit |
| 255 | Putative prostate cancer tumor suppressor |

[0091] Leave One Out Cross Validation (LOOCV) resulted in 92% sensitivity and 61% specificity, shown in Table 4. The ROC curve gave an AUC of 0.897, as shown in FIG. 1.

TABLE 6

| SEQ | | | | | | | |
|---|---|---|---|---|---|---|---|
| ID | Signal | | | | | | |
| | PC_984TT | PC_986TT | FA_987TT | PC_988TT | PC_989TT | FA_992TT | FA_993TT |
| 12 | 3399.2 | 7041.3 | 5438 | 6376.7 | 2734.6 | 3569.5 | 4305.9 |
| 18 | 6550.8 | 5870.6 | 5815.9 | 4265.1 | 8856.4 | 3454.4 | 20405.3 |
| 29 | 4578.6 | 6455.8 | 2329.4 | 4259 | 2666.8 | 3694 | 7531.2 |
| | FA_994TT | FA_995TT | FA_996TT | FA_998TT | FA_999TT | FA_1001TT | FA_1002TT |
| 12 | 2545.7 | 2451.8 | 4418 | 3938.3 | 3648.5 | 6834.5 | 4882 |
| 18 | 12566.4 | 9889.5 | 4341.5 | 5210.1 | 6639.5 | 4794.8 | 3921.9 |
| 29 | 2239.8 | 1834.5 | 4607.1 | 6424.1 | 3069.6 | 4301.4 | 3164 |
| | FA_1004TT | FA_1005TT | FA_1006TT | FA_1010TT | FA_1013TT | FA_1014TT | FA_1017TT |
| 12 | 2274.9 | 2644.2 | 3978.8 | 2999.7 | 4012.5 | 1724 | 5005.8 |
| 18 | 10402 | 7376.3 | 9985.1 | 1330.3 | 4618.8 | 6132 | 4562.6 |
| 29 | 1688.9 | 4771.2 | 3159.1 | 3082.6 | 6861.7 | 1465 | 3384.7 |
| | FA_1018TT | FA_1020TT | FA_1023TT | FA_1024TT | FA_1026TT | FA_1027TT | FA_1028TT |
| 12 | 2847.6 | 7102 | 7513.5 | 2086.3 | 2431.3 | 1318.2 | 1231 |
| 18 | 6388.5 | 2640.8 | 1967.7 | 6853.3 | 5068.5 | 2006.4 | 1804.9 |
| 29 | 3829.5 | 4235 | 4272.5 | 924 | 1702.3 | 1691.5 | 1731.3 |
| | FA_1029TT | FA_1030TT | FA_1031TT | FA_1032TT | FA_1034TT | FA_1035TT | FC_1037TT |
| 12 | 4607.6 | 2416.1 | 2203.7 | 6489.9 | 2095.3 | 1547.9 | 1847.4 |
| 18 | 3507.3 | 2270.8 | 8058 | 11247.5 | 8258.1 | 7485.8 | 8309 |
| 29 | 1530.5 | 5641.4 | 3460.1 | 4802.1 | 1650.7 | 854.6 | 2418.4 |
| | PC_1039TT | PC_1040TT | PC_1041TT | PC_1042TT | PC_1043TT | PC_1044TT | PC_1045TT |
| 12 | 8204.9 | 2638.5 | 4795 | 2607.8 | 6725.4 | 5178.7 | 2111.1 |
| 18 | 6454.7 | 10129.3 | 7964 | 4952.6 | 3663.3 | 1887.7 | 19840.6 |
| 29 | 8858.5 | 4136.8 | 8434 | 2230.7 | 3434 | 2770 | 2243.1 |
| | PC_1046TT | PC_1047TT | PC_1048TT | PC_1049TT | PC_1050TT | PC_1051TT | PC-FV_1052TT |
| 12 | 4403.6 | 9394.7 | 2262.5 | 4831.2 | 2826.9 | 1288.6 | 1953.2 |
| 18 | 2417.7 | 5678.4 | 6655.2 | 4325.2 | 1706 | 6904.8 | 4596.1 |
| 29 | 2319.8 | 20509.6 | 1176.1 | 5375.3 | 2053.1 | 4027.5 | 3332.3 |
| | PC_1053TT | PC_1054TT | PC_1055TT | PC_1059TT | PC_1060TT | PC_1061TT | PC_1062TT |
| 12 | 4150.4 | 6180.4 | 1835.7 | 2447.2 | 4201.3 | 4984.3 | 3399.3 |
| 18 | 5965.7 | 13847.6 | 3740.6 | 4167.7 | 14516.2 | 4896.7 | 8891.6 |
| 29 | 3718.1 | 4818.3 | 1728.8 | 2972.2 | 4851 | 3469 | 3718.6 |
| | PC- | PC- | PC- | | PC- | PC- | |
| | FV_1064TT | FV_1065TT | FV_1066TT | PC-FV_1067TT | FV_1068TT | FV_1069TT | PC-FV_1071TT |
| 12 | 4221 | 4884.5 | 7256.6 | 640 | 4055 | 3208.2 | 6301.3 |
| 18 | 4095 | 6627.6 | 1427.1 | 5405.5 | 10722 | 11509.9 | 10314.3 |
| 29 | 5896.7 | 5461.2 | 9437.3 | 1634.4 | 1344.2 | 2186.4 | 1794.8 |
| | PC- | | | | | | |
| | FV_1072TT | FA_1073TT | FA_1074TT | FA_1075TT | FA_1076TT | FC_1077TT | FC_1078TT |
| 12 | 1390.3 | 3325.5 | 1430.8 | 1784.4 | 1563.9 | 1999.4 | 1830.7 |
| 18 | 5629 | 10010.5 | 3459.2 | 11454 | 10807.8 | 1384.8 | 11906.2 |
| 29 | 2974.5 | 7133.1 | 3009 | 4184.9 | 1673.9 | 1044.5 | 4264.1 |
| | | PC- | PC- | | | | |
| | FC_1079TT | FV_1080TT | FV_1081TT | FC_1082TT | pb1 | pb2 | pb3 |
| 12 | 2856.2 | 2437.9 | 3541.2 | 4439.8 | 11.4 | 9.1 | 9.9 |
| 18 | 22738 | 4344.1 | 4108.3 | 3312.3 | 94.2 | 50.7 | 67.6 |
| 29 | 1092.8 | 3052.8 | 3302.6 | 2383 | 8.7 | 21.6 | 30.5 |
| | pb4 | pb5′ | pb6′ | pb7′ | pb8′ | pd10 | pd11 |
| 12 | 33.8 | 8.3 | 6.6 | 18.8 | 61.4 | 38.2 | 10.7 |
| 18 | 74.9 | 29.7 | 53.6 | 37.8 | 31.8 | 68.8 | 117.5 |
| 29 | 66.1 | 64.6 | 36.4 | 51.5 | 25.1 | 17.2 | 17.2 |
| | pd12 | pd9 | | | | | |
| 12 | 4.1 | 11.6 | | | | | |
| 18 | 70.8 | 23.4 | | | | | |
| 29 | 19.7 | 11 | | | | | |

[0092] TABLE 7

| SEQ | | | | | | | |
|---|---|---|---|---|---|---|---|
| ID | Signal | | | | | | |
| | FA_987TT | FA_992TT | FA_993TT | FA_994TT | FA_995TT | FA_996TT | FA_998TT |
| 354 | 50.9 | 100.4 | 63.7 | 14 | 699.7 | 181.7 | 11.9 |
| 199 | 81.7 | 18 | 43.3 | 130.3 | 461.9 | 469.4 | 135.6 |
| 207 | 3844.9 | 1325.1 | 77.9 | 397.2 | 518.3 | 807.5 | 1084.3 |
| 255 | 1374.4 | 2332.1 | 1631 | 611.1 | 1616.7 | 419.2 | 230.7 |
| | FA_999TT | FA_1001TT | FA_1002TT | FA_1004TT | FA_1005TT | FA_1006TT | FA_1010TT |
| 354 | 194.7 | 2397.3 | 50.6 | 205.2 | 9.6 | 29.1 | 341.5 |
| 199 | 124.1 | 574.9 | 206 | 158.5 | 423.6 | 121 | 2489.4 |
| 207 | 1861.5 | 1325.1 | 846.6 | 308.8 | 1765.9 | 598.9 | 1067.7 |
| 255 | 266.5 | 186.7 | 324.2 | 94 | 1071.3 | 1098.5 | 1294 |
| | FA_1013TT | FA_1014TT | FA_1017TT | FA_1018TT | FA_1020TT | FA_1023TT | FA_1024TT |
| 354 | 207.5 | 69 | 21.7 | 20.1 | 64.7 | 87.4 | 372.5 |
| 199 | 440.8 | 99.8 | 221.6 | 226.9 | 108.2 | 155.2 | 112.6 |
| 207 | 535.7 | 1910.9 | 1185.2 | 571.8 | 1552.7 | 2739.5 | 692.6 |
| 255 | 437.2 | 655.6 | 165.1 | 178.4 | 86.4 | 436.5 | 40.7 |
| | FA_1026TT | FA_1027TT | FA_1028TT | FA_1029TT | FA_1030TT | FA_1031TT | FA_1032TT |
| 354 | 21.5 | 18.1 | 3.8 | 13.3 | 66 | 15.1 | 38.8 |
| 199 | 70.9 | 46.1 | 561.3 | 67.7 | 35.8 | 48 | 107.3 |
| 207 | 1230.4 | 80.5 | 732 | 3216.4 | 2253.5 | 1989.9 | 2115.2 |
| 255 | 479.9 | 226.5 | 35.9 | 1403.4 | 1144.3 | 247.9 | 1989.4 |
| | FA_1034TT | FA_1035TT | FA_1073TT | FA_1074TT | FA_1075TT | FA_1076TT | PC_984TT |
| 354 | 61.3 | 25.3 | 1355.7 | 188.5 | 14.7 | 8.9 | 97.5 |
| 199 | 216.5 | 56.1 | 1980.6 | 454.1 | 86.2 | 173.8 | 154.2 |
| 207 | 421.8 | 1493.5 | 771.6 | 1291.4 | 116.5 | 1169.9 | 759.2 |
| 255 | 489.2 | 229.5 | 205.3 | 655 | 152.7 | 156.3 | 152 |
| | PC_986TT | PC_988TT | PC_989TT | PC_1039TT | PC_1040TT | PC_1041TT | PC_1042TT |
| 354 | 966.6 | 619 | 12.9 | 2577 | 540.4 | 1229.7 | 320 |
| 199 | 103.9 | 142.5 | 288.5 | 1006.6 | 3990.7 | 17402.7 | 1023.2 |
| 207 | 400.5 | 2357.5 | 1213.8 | 627.5 | 62.6 | 133.6 | 981.5 |
| 255 | 299.7 | 2137.5 | 131.9 | 500.6 | 2412.4 | 2763.1 | 303.4 |
| | PC_1043TT | PC_1044TT | PC_1045TT | PC_1046TT | PC_1047TT | PC_1048TT | PC_1049TT |
| 354 | 444.3 | 170.8 | 817.6 | 1095.1 | 966.8 | 1263.5 | 800.7 |
| 199 | 604.3 | 222.7 | 22961.4 | 9488.3 | 10311.6 | 1702.7 | 1366 |
| 207 | 1680.3 | 594.2 | 136.5 | 673.2 | 755 | 20.8 | 254.8 |
| 255 | 407.6 | 4162.4 | 872.5 | 2472.3 | 1497.3 | 2944.8 | 2399.9 |
| | PC_1050TT | PC_1051TT | PC_1053TT | PC_1054TT | PC_1055TT | PC_1059TT | PC_1060TT |
| 354 | 292.9 | 614.4 | 1035.4 | 1545.3 | 139.5 | 500.2 | 37.1 |
| 199 | 117 | 29233.8 | 1435 | 8550.5 | 242.8 | 13914.6 | 2377.3 |
| 207 | 87.8 | 113.4 | 73.3 | 187.7 | 491.6 | 158.4 | 207.3 |
| 255 | 2331.8 | 917.2 | 1505.9 | 2186.4 | 3033.2 | 2191.1 | 215.4 |
| | PC_1061TT | PC_1062TT | FC_1037TT | FC_1077TT | FC_1078TT | FC_1079TT | FC_1082TT |
| 354 | 71 | 23.8 | 18.4 | 28.9 | 87.2 | 13.5 | 27.7 |
| 199 | 6933.5 | 616.2 | 21.2 | 226.7 | 200.8 | 40.8 | 144.4 |
| 207 | 1088.5 | 1133.5 | 838.8 | 2012.3 | 24.9 | 196.8 | 1356.4 |
| 255 | 3084.8 | 1017.8 | 1355.3 | 199 | 1352.4 | 1578 | 1294.4 |
| | | | PC- | PC- | PC- | PC- | PC- |
| | PC-FV_1052TT | PC-FV_1064TT | FV_1065TT | FV_1066TT | FV_1067TT | FV_1068TT | FV_1069TT |
| 354 | 394.8 | 131.4 | 143.7 | 281.9 | 302.1 | 973.6 | 44.9 |
| 199 | 4620.7 | 1931 | 1613.2 | 170.8 | 579.2 | 20066.3 | 96.9 |
| 207 | 88.2 | 1033.1 | 705 | 244.1 | 2559 | 8.8 | 12.3 |
| 255 | 2479.7 | 242.2 | 1322 | 641.9 | 1222.8 | 1914.8 | 93.2 |
| | | | PC- | PC- | | | |
| | PC-FV_1071TT | PC-FV_1072TT | FV_1080TT | FV_1081TT | | | |
| 354 | 109.5 | 127.2 | 205.7 | 12.4 | | | |
| 199 | 257.5 | 2302.7 | 320 | 206 | | | |
| 207 | 42.9 | 72.2 | 2795.9 | 145 | | | |
| 255 | 1128.1 | 2320.8 | 1705.2 | 196.8 | | | |

C. Manual Selection of Markers

[0093] Individual genes were selected with an aim to formulate a RT-PCR based assay. Comparison of gene expression profiles between thyroid cancers and non-cancer tissues has identified a five-gene signature from these 322 genes. The identities of these five genes are shown in Tables 8 and 16 and the chip data are shown in Table 9. The performance of this signature was assessed using LDA in the 98 samples, and the signature gives 92% sensitivity and 70% specificity, shown in Table 10. The ROC curve gave an AUC of 0.88, as shown in FIG. 2.

TABLE 8
5-Gene signature

| SEQ ID NO: | Gene Name |
|---|---|
| 53 | Cadherin 3, type 1 (P cadherin) |
| 242 | Fibronectin |
| 73 | Secretory granule, neuroendocrine protein 1 |
| 36 | Testican-1 |
| 211 | Thyroid Peroxidase (TPO) |

[0094] TABLE 9

| SEQ | | | | | | | |
|---|---|---|---|---|---|---|---|
| ID | | | | | | | |
| | BN_800TT | BN_801TT | BN_802TT | BN_804TT | BN_805TT | BN_806TT | BN_807TT |
| 36 | 908.3 | 247 | 118.9 | 349.7 | 425.1 | 229.8 | 227.7 |
| 53 | 48.6 | 25 | 24.1 | 34 | 17.8 | 32.2 | 16.7 |
| 76 | 252.3 | 272.9 | 75.2 | 260.6 | 169 | 587.1 | 189.8 |
| 242 | 22247.9 | 1204.2 | 676.7 | 2441.5 | 3900.1 | 2073.4 | 2060.1 |
| 211 | 24.2 | 16983.5 | 32579.5 | 20189.3 | 24480.5 | 14186.3 | 6488.1 |
| | BN_871TT | BN_913TT | BN_914TT | BN_915TT | FA_917TT | FA_918TT | FA_919TT |
| 36 | 897.2 | 435.1 | 442.3 | 508.7 | 169.6 | 184.3 | 213.3 |
| 53 | 192.4 | 28 | 76.1 | 44.2 | 67.7 | 135.7 | 25.7 |
| 76 | 2134.6 | 252.5 | 956.3 | 174.3 | 62 | 144 | 233.8 |
| 242 | 13722.5 | 10481.9 | 4172.9 | 1891.1 | 1654.2 | 11791 | 2788.1 |
| 211 | 6243.3 | 16339.1 | 14355 | 36350.1 | 29876.5 | 19395.7 | 15935.8 |
| | FA_818TT | FA_819TT | FA_820TT | FA_821TT | FA_822TT | FA_842TT | FA_862TT |
| 36 | 120.4 | 155.8 | 210.6 | 31.7 | 283.3 | 122.2 | 24.1 |
| 53 | 27.2 | 26.9 | 34 | 33.2 | 34.4 | 27.8 | 66.1 |
| 76 | 13 | 69.8 | 36.2 | 171.2 | 116.2 | 190.8 | 15.9 |
| 242 | 1433.3 | 2211.8 | 2714.7 | 325 | 2278 | 3959.5 | 1573.1 |
| 211 | 15976.6 | 19882.4 | 10029.6 | 29411.3 | 25179.3 | 12492.5 | 32721.4 |
| | FA_863TT | FA_864TT | FA_865TT | FA_866TT | FA_867TT | FA_869TT | FA_907TT |
| 36 | 955.1 | 173.1 | 400.5 | 230.8 | 233.5 | 2581.5 | 207.8 |
| 53 | 333.9 | 27.9 | 147.1 | 155 | 25 | 1224.9 | 52.8 |
| 76 | 2614.7 | 624.1 | 614.9 | 336.7 | 163.5 | 1921.3 | 38.5 |
| 242 | 930.4 | 1419.2 | 4708.4 | 2169.8 | 1081.9 | 3241.5 | 4555.3 |
| 211 | 19631.3 | 27382.8 | 29846 | 25011.6 | 30599.1 | 23680.6 | 35313.3 |

| | FA_908TT | FA_920TT | FA_938TT | FA_940TT | FA_941TT | Fa_EA40374_921TT | Fa_EA40376_923TT |
|---|---|---|---|---|---|---|---|
| 36 | 329.6 | 165.4 | 331.5 | 298.8 | 267.4 | 211.3 | 188.6 |
| 53 | 35.8 | 28.5 | 21.7 | 291.4 | 45.3 | 23.8 | 62.8 |
| 76 | 253.8 | 64.7 | 3312.7 | 870.1 | 1038.3 | 153.3 | 236.1 |
| 242 | 1630.4 | 2452.4 | 6684 | 765 | 2229.5 | 1809.2 | 3314 |
| 211 | 21639.5 | 31897.6 | 26420.3 | 18786.4 | 31922.5 | 36025.3 | 15065.2 |

| | BN_EA40377_924TT | Fa_EA40378_925TT | Fa_EA40379_926TT | BN_EA40380_927TT |
|---|---|---|---|---|
| 36 | 1409.1 | 215.1 | 228.5 | 833.3 |
| 53 | 2294.2 | 40.5 | 496.1 | 64.9 |
| 76 | 624.1 | 149.1 | 211.3 | 501.1 |
| 242 | 21699.6 | 1079.3 | 21653.5 | 3263.3 |
| 211 | 664.1 | 12583.3 | 13036.6 | 43191.4 |

| | Fa_EA40387_955TT | Fa_EA40388_956TT | Fa_EA40389_957TT |
|---|---|---|---|
| 36 | 94.7 | 259.7 | 786.2 |
| 53 | 197.4 | 230.4 | 17.3 |
| 76 | 2225.4 | 1443.7 | 223.7 |
| 242 | 2194.8 | 989.6 | 2107.8 |
| 211 | 9409.2 | 19630.9 | 4160.9 |

| | Fa_EA40390_959TT | Fa_EA40391_960TT | Fa_EA40392_961TT | Fa_EA40393_962TT | PC_829TT | PC_830TT | PC_831TT |
|---|---|---|---|---|---|---|---|
| 36 | 2496.1 | 175.3 | 58.2 | 1470.7 | 330.3 | 210.3 | 432.7 |
| 53 | 24.4 | 40.3 | 52.6 | 183 | 73 | 49.6 | 1916.2 |
| 76 | 2397 | 47.6 | 77.2 | 1048.1 | 758.4 | 576.2 | 394.3 |
| 242 | 1991.2 | 1042.5 | 1474.6 | 688.1 | 6760 | 6785 | 25733 |
| 211 | 38927.5 | 31764 | 34287.3 | 44314.7 | 25565 | 31930.4 | 138.4 |

| | PC_832TT | PC_834TT | PC_835TT | PC_836TT | PC_837TT | PC_838TT | PC_839TT |
|---|---|---|---|---|---|---|---|
| 36 | 1376.8 | 4076.8 | 1208.3 | 585 | 1015.5 | 1620.2 | 71 |
| 53 | 1909.1 | 2701 | 1178.5 | 710.7 | 1469.6 | 3009.9 | 41.2 |
| 76 | 433.6 | 665.5 | 654.3 | 2432.3 | 412.1 | 1946.7 | 327.2 |
| 242 | 9423.8 | 18037.6 | 23053.8 | 1044.8 | 22442.7 | 27313.9 | 3641 |
| 211 | 7174.2 | 1961.7 | 282.1 | 24646.9 | 15840.2 | 264.2 | 17049.3 |
| | PC_879TT | PC_881TT | PC_882TT | PC_883TT | PC_884TT | PC_885TT | PC_886TT |
| 36 | 457.4 | 1779.4 | 561.2 | 722.1 | 1129.2 | 552.5 | 1244.9 |
| 53 | 2036.8 | 3121.5 | 2072.4 | 2753 | 2221.1 | 1703.8 | 1325.9 |
| 76 | 1168 | 1829.9 | 1210.6 | 2663.6 | 1076 | 1232.2 | 1866.8 |
| 242 | 46283.3 | 32477.3 | 33142.3 | 38026.7 | 42087.5 | 49249 | 39172.5 |
| 211 | 86.8 | 613.5 | 48.3 | 126.2 | 1565.2 | 120 | 1553 |
| | PC_890TT | PC_892TT | PC_893TT | PC_894TT | PC_903TT | PC_904TT | PC_928TT |
| 36 | 813.3 | 2211.4 | 1046.2 | 585.3 | 3395 | 767.9 | 246.6 |
| 53 | 4685.6 | 3536.8 | 1363.5 | 1244.4 | 3057.5 | 199.9 | 41.1 |
| 76 | 3926.2 | 2787 | 2359.3 | 1020.3 | 1564 | 203.6 | 421.5 |
| 242 | 36114.4 | 31599.6 | 34700.3 | 41193.8 | 18485.8 | 19181.5 | 3729.4 |
| 211 | 1569.2 | 1703.6 | 234.5 | 1594 | 4063.1 | 5354.1 | 18199.2 |

| | PC_932TT | PC_933TT | Pc_EA40375_922TT | Pc_EA40381_945TT |
|---|---|---|---|---|
| 36 | 352.4 | 920.3 | 316.8 | 818.6 |
| 53 | 3447.4 | 788.3 | 41.8 | 803.9 |
| 76 | 850.2 | 865.6 | 211.2 | 237.9 |
| 242 | 21913.7 | 24536 | 1758.5 | 13301.5 |
| 211 | 490.5 | 13171.6 | 30959.7 | 331 |

| | Pc_EA40382_946TT | Pc_EA40383_947TT | Pc_EA40384_948TT |
|---|---|---|---|
| 36 | 3078.8 | 532.1 | 311.1 |
| 53 | 2330.1 | 1337.6 | 1556.2 |
| 76 | 1830 | 1279.7 | 598 |
| 242 | 22076.9 | 31987.1 | 27579.2 |
| 211 | 857.8 | 2007.7 | 556.5 |

| | FC_823TT | FC_824TT | FC_825TT | FC_827TT | FC_828TT | FC_840TT | FC_896TT |
|---|---|---|---|---|---|---|---|
| 36 | 282.5 | 2413 | 1506.3 | 821.8 | 564.4 | 331.6 | 857.1 |
| 53 | 23.2 | 24.1 | 25.5 | 348.1 | 27.8 | 32.3 | 245.4 |
| 76 | 460.1 | 2833.9 | 1128.9 | 1421.6 | 705.3 | 341.8 | 358.9 |
| 242 | 12129 | 22000.8 | 874.8 | 2544.9 | 845.1 | 3459.7 | 1998.1 |
| 211 | 30520.5 | 496.2 | 7923.9 | 11508.2 | 33401.7 | 10882.8 | 1625.3 |
| | FC_898TT | FC_899TT | FC_900TT | FC_901TT | FC_902TT | FC_909TT | FC_910TT |
| 36 | 827.5 | 1152.4 | 778.8 | 11199.3 | 578.7 | 713 | 132.4 |
| 53 | 38.1 | 1949.7 | 2221 | 29.8 | 185.9 | 21.5 | 57.2 |
| 76 | 2517.5 | 1009.8 | 3523.8 | 28603.2 | 2201.1 | 195.6 | 4744.8 |
| 242 | 39786.8 | 38117 | 29127.6 | 4032.5 | 43673.6 | 3478.5 | 1273.2 |
| 211 | 1160.7 | 132.9 | 79.4 | 26.8 | 251.4 | 488 | 8979.7 |

| | Fc_EA40386_954TT | Fc_EA40394_967TT | Fc_EA40395_968TT | Fc_EA40396_969TT |
|---|---|---|---|---|
| 36 | 619.3 | 412.7 | 134 | 218.6 |
| 53 | 15.8 | 31 | 23.8 | 55.9 |
| 76 | 4136.1 | 682.5 | 41.2 | 18.4 |
| 242 | 969.6 | 5003.3 | 13867.1 | 2129.7 |
| 211 | 20581.7 | 1509.8 | 2603.1 | 15427.4 |

| | Fc_EA40397_970TT | Fc_EA40405_982TT | Fc_EA40406_983TT |
|---|---|---|---|
| 36 | 463 | 1233.6 | 234.6 |
| 53 | 65.5 | 31.6 | 120.8 |
| 76 | 594.7 | 931 | 2232 |
| 242 | 15742.7 | 4086.9 | 11985.6 |
| 211 | 369.3 | 30161.2 | 19869.7 |

[0095] TABLE 10
5-Gene signature performance in 98 training samples

| | Tumor | Benign |
|---|---|---|
| Positive | 48 | 14 |
| Negative | 4 | 32 |

| | |
|---|---|
| Sensitivity | 92% (0.82, 0.97) |
| Specificity | 70% (0.55, 0.81) |

D. Cross Validation with the 74 Independent Thyroid Samples

[0096] 74 independent thyroid samples were processed and profiled with the U133a chip, and the chip data for these two signatures are shown in the Table 11. The performances of the 4-gene and the 5-gene signatures were assessed with LDA. Both signatures gave equivalent performance in these samples compared to the 98 training samples. The sensitivity and specificity for both signatures are shown in Table 12, and the ROC curves are demonstrated in FIGS. 3a and 3b.

TABLE 11

| SEQ | | | | | | | |
|---|---|---|---|---|---|---|---|
| ID | Signal | | | | | | |
| | FA_987TT | FA_992TT | FA_993TT | FA_994TT | FA_995TT | FA_996TT | FA_998TT |
| 36 | 92.8 | 437.8 | 640.5 | 4152.5 | 714.7 | 254.8 | 303.4 |
| 53 | 15.8 | 422.8 | 25.2 | 29.5 | 258.9 | 45.6 | 26.8 |
| 76 | 485.1 | 2536.5 | 1708.6 | 288.3 | 643.3 | 605.6 | 341 |
| 242 | 686.5 | 971.4 | 24532.8 | 895.7 | 6424.8 | 842.1 | 905.1 |
| 211 | 28269.8 | 14689.4 | 357.5 | 33711.6 | 34943.2 | 16131 | 22376.1 |
| | FA_999TT | FA_1001TT | FA_1002TT | FA_1004TT | FA_1005TT | FA_1006TT | FA_1010TT |
| 36 | 63.7 | 22.3 | 55.6 | 408.5 | 128.3 | 353 | 442 |
| 53 | 30.9 | 31.8 | 39.6 | 70.8 | 37.9 | 38.9 | 119.6 |
| 76 | 110.7 | 90.2 | 253.5 | 159.1 | 1559.6 | 413.7 | 1222.5 |
| 242 | 1550.6 | 1689.3 | 256.5 | 1668 | 3921.5 | 1013.2 | 1837.3 |
| 211 | 26779.6 | 15870.7 | 24525.5 | 43040.2 | 25392.9 | 32641.9 | 20140.7 |
| | FA_1013TT | FA_1014TT | FA_1017TT | FA_1018TT | FA_1020TT | FA_1023TT | FA_1024TT |
| 36 | 453.5 | 333.7 | 179.6 | 146.6 | 417.3 | 75.1 | 129.2 |
| 53 | 39.8 | 21.4 | 99.9 | 23.7 | 26.8 | 62.3 | 22.2 |
| 76 | 333.7 | 1231.2 | 241.1 | 131 | 1435.3 | 1491.6 | 260.8 |
| 242 | 1459.4 | 415 | 1696.3 | 287.1 | 617.5 | 1932.6 | 1689.2 |
| 211 | 7911.3 | 19359.4 | 18089 | 18222.8 | 30038.8 | 9053 | 15611.2 |
| | FA_1026TT | FA_1027TT | FA_1028TT | FA_1029TT | FA_1030TT | FA_1031TT | FA_1032TT |
| 36 | 281.1 | 130.5 | 150.4 | 629.1 | 760.4 | 191.6 | 1671.5 |
| 53 | 125.5 | 62.3 | 118.2 | 230.7 | 420.5 | 27.7 | 519 |
| 76 | 77.4 | 111.9 | 184 | 2100.9 | 1741.3 | 338.1 | 3643.5 |
| 242 | 1091.6 | 754.3 | 705.9 | 684.7 | 372.4 | 1848.8 | 3094.7 |
| 211 | 21979.1 | 7890.5 | 26226 | 15344.1 | 10368 | 30439.9 | 23943.3 |
| | FA_1034TT | FA_1035TT | FA_1073TT | FA_1074TT | FA_1075TT | FA_1076TT | PC_984TT |
| 36 | 24.8 | 119.9 | 111.7 | 1010.9 | 26 | 224.5 | 303 |
| 53 | 29.6 | 30.4 | 366.7 | 96.9 | 94.3 | 31 | 37.2 |
| 76 | 289.3 | 239.7 | 167.4 | 326.8 | 818.9 | 248.5 | 198.3 |
| 242 | 1482.1 | 590.9 | 4842.5 | 2815.5 | 2726.8 | 754.8 | 785.1 |
| 211 | 38135.4 | 30510.6 | 29406.4 | 31075.4 | 20833.9 | 34960.4 | 24938.2 |
| | PC_986TT | PC_988TT | PC_989TT | PC_1039TT | PC_1040TT | PC_1041TT | PC_1042TT |
| 36 | 676.3 | 391.7 | 264.9 | 735.7 | 524.7 | 769.9 | 1125 |
| 53 | 32.5 | 395.6 | 305.5 | 655 | 1153.9 | 2194.1 | 111.5 |
| 76 | 287.9 | 1384.8 | 888.3 | 1048.4 | 1381.1 | 412.6 | 1384.9 |
| 242 | 2450.7 | 2243.2 | 698.6 | 20366.4 | 32090.9 | 27480.9 | 1915.7 |
| 211 | 2689.5 | 19903.2 | 32075.9 | 9197.7 | 152.2 | 1862.2 | 10375.9 |
| | PC_1043TT | PC_1044TT | PC_1045TT | PC_1046TT | PC_1047TT | PC_1048TT | PC_1049TT |
| 36 | 1013.6 | 1023.8 | 809.8 | 1811.1 | 1546.2 | 481.8 | 2491.9 |
| 53 | 730.7 | 2965.3 | 2533.7 | 2052.8 | 756.1 | 988.3 | 2000.6 |
| 76 | 1977.4 | 3380.4 | 422 | 4343.9 | 3570.2 | 1786.8 | 1619.4 |
| 242 | 3907.5 | 20074.8 | 41761.2 | 33253.5 | 28124.7 | 30516 | 21324.5 |
| 211 | 7015.5 | 11.5 | 136.1 | 59.1 | 3841.7 | 31.1 | 1476 |
| | PC_1050TT | PC_1051TT | PC_1053TT | PC_1054TT | PC_1055TT | PC_1059TT | PC_1060TT |
| 36 | 443.9 | 669 | 477.1 | 952.8 | 645.3 | 660.2 | 648.5 |
| 53 | 4037.8 | 1290.7 | 933.9 | 1336.9 | 2123.2 | 1353.8 | 66.9 |
| 76 | 856.7 | 1039 | 463.2 | 1399.8 | 4385 | 365.8 | 160.7 |
| 242 | 1261.6 | 58258.5 | 26004.9 | 21219.8 | 12760.8 | 26084.4 | 3277.6 |
| 211 | 1150.2 | 375.9 | 73.2 | 2575.8 | 400.5 | 24.2 | 1637.7 |
| | PC_1061TT | PC_1062TT | FC_1037TT | FC_1077TT | FC_1078TT | FC_1079TT | FC_1082TT |
| 36 | 3523.2 | 1912.5 | 234.2 | 128.3 | 825.1 | 297.5 | 1447.6 |
| 53 | 2348.3 | 975.7 | 97.6 | 46.2 | 15.8 | 38.5 | 254.6 |
| 76 | 4994.9 | 3891.7 | 5559.8 | 252 | 1103.5 | 700 | 1754.7 |
| 242 | 15397.4 | 2006.1 | 1826 | 2407.5 | 22661.8 | 1595.5 | 713.7 |
| 211 | 3379.4 | 2201.9 | 41570 | 15804.5 | 3572.1 | 4377.9 | 16863.7 |
| | PC- | | | PC- | PC- | PC- | PC- |
| | FV_1052TT | PC-FV_1064TT | PC-FV_1065TT | FV_1066TT | FV_1067TT | FV_1068TT | FV_1069TT |
| 36 | 1993.3 | 230.6 | 1128.8 | 708.4 | 1348 | 331.4 | 33.2 |
| 53 | 2450.3 | 72.7 | 610.3 | 72.5 | 146.4 | 1073.7 | 21.5 |
| 76 | 2075 | 451.3 | 1350.2 | 922.5 | 1743.7 | 950.5 | 332.8 |
| 242 | 21494 | 7110.9 | 10228.8 | 2206.3 | 3319.2 | 28034.2 | 430.1 |
| 211 | 1581.5 | 29936.9 | 1594.7 | 5693.1 | 11288.8 | 573.6 | 12485.5 |
| | PC- | | | PC- | | | |
| | FV_1071TT | PC-FV_1072TT | PC-FV_1080TT | FV_1081TT | | | |
| 36 | 148.9 | 332.2 | 1288.7 | 672 | | | |
| 53 | 1836.9 | 1450.3 | 2221 | 22.9 | | | |
| 76 | 4053 | 1628.6 | 2275.9 | 62.6 | | | |
| 242 | 1810.6 | 26396.9 | 683.4 | 984 | | | |
| 211 | 8.9 | 24 | 3416.7 | 2630.8 | | | |

[0097] TABLE 12
4-Gene and 5-gene signatures performance in 74 validation samples

| | |
|---|---|
| Tumor | Benign |

4-Gene Signature

| | | |
|---|---|---|
| Positive | 33 | 12 |
| Negative | 3 | 26 |

| | |
|---|---|
| Sensitivity | 92% (0.78, 0.97) |
| Specificity | 68% (0.53, 0.81) |

5-Gene Signature

| | | |
|---|---|---|
| Positive | 33 | 9 |
| Negative | 3 | 29 |

| | |
|---|---|
| Sensitivity | 92% (0.78, 0.97) |
| Specificity | 76% (0.61, 0.87) |

E. Control Gene Marker Identification

[0098] With the 98 thyroid samples and 12 PBL samples we selected two groups of genes as sampling control. One group consists of genes that are expressed in thyroid but not in PBL, the second group includes genes that are expressed in PBL but not in thyroid. The full gene list and corresponding chip data are shown in Tables 13a and 13b. From these genes we selected six genes that are abundant and the differentiation between thyroid and PBL is relatively large. Their expression profile was validated in the 74 independent thyroid samples. The identities of these six genes are listed in Table 14 and their chip data are shown in Tables 15a and 15b.

TABLE 13a
13a1

| SEQ | ThyMixBen_. . ._Signal | | |
|---|---|---|---|
| ID | 02014_40062_H133A_800TT | 02014_40063_H133A_801TT | 02014_40064_H133A_802TT |
| 2 | 2789.6 | 2676.2 | 3009.2 |
| 3 | 6346.1 | 794.7 | 623.9 |
| 5 | 845.5 | 3039.1 | 4452.6 |
| 6 | 2730.4 | 1108.5 | 1155.6 |
| 9 | 2248.9 | 12094.5 | 7529.2 |
| 12 | 10625.3 | 3137.2 | 2382.7 |
| 18 | 3171 | 5947.9 | 13241.7 |
| 22 | 2715.2 | 9522.5 | 6429.7 |
| 25 | 19159.3 | 1467.3 | 550.1 |
| 28 | 722.7 | 835.1 | 727.1 |
| 32 | 4160.6 | 8115.2 | 4061.8 |
| 39 | 314.3 | 1243.1 | 1486.8 |
| 74 | 323.9 | 1227.6 | 1965.1 |
| 78 | 250.8 | 677 | 1029.5 |
| 143 | 1337.3 | 1339.1 | 2607.9 |
| 174 | 1263.1 | 4430.7 | 6041.6 |
| 175 | 1996.3 | 1829.5 | 3632.7 |
| 191 | 7108.4 | 848.3 | 2063 |
| 212 | 258.2 | 1405.8 | 1196.9 |
| 222 | 20586.8 | 1371.2 | 2411.9 |
| 233 | 1410.6 | 14126.8 | 3020.4 |
| 234 | 5048.1 | 2183.3 | 3215.5 |
| 237 | 905 | 3397.9 | 2525.1 |
| 238 | 198 | 1937.7 | 1289.5 |
| 245 | 143.7 | 1598.5 | 1964.2 |
| 250 | 1300.9 | 777 | 1405.9 |
| 252 | 945.6 | 1547.3 | 1210.2 |
| 264 | 455.1 | 988.1 | 932.8 |
| 290 | 345.6 | 327.2 | 533.1 |
| 294 | 1043 | 3655.8 | 4435.4 |
| 296 | 845.5 | 1242.5 | 1068.6 |
| 342 | 771.4 | 535.9 | 998.5 |
| SEQ | ThyMixBen_. . ._Signal | | |
| ID | 02014_40065_H133A_804TT | 02014_40066_H133A_805TT | 02014_40067_H133A_806TT |
| 2 | 2957.5 | 3644.5 | |
| 3 | 772 | 2977.3 | 622.7 |
| 5 | 2982.5 | 8283.2 | 1627.6 |
| 6 | 2201.2 | 1954.3 | 1750 |
| 9 | 2827.3 | 7701.7 | 1548.3 |
| 12 | 5727.8 | 6238 | 4685.1 |
| 18 | 10294.9 | 7849.3 | 4037.4 |
| 22 | 2590.9 | 5294.3 | 6490.4 |
| 25 | 2838 | 11294.7 | 1374.2 |
| 28 | 568.1 | 1336.7 | 740.7 |
| 32 | 6625.3 | 7348.9 | 3964.1 |
| 39 | 742.5 | 1027.7 | 1185.9 |
| 74 | 1281.5 | 760.1 | 505.4 |
| 78 | 403.7 | 795.2 | 355 |
| 143 | 1758.8 | 1933.5 | 1809 |
| 174 | 3543.2 | 7346 | 3920.5 |
| 175 | 1646.5 | 2847.5 | 3054.2 |
| 191 | 1133.9 | 1482.4 | 1149 |
| 212 | 882.4 | 1296.8 | 1790 |
| 222 | 2573.9 | 1228.6 | 1342 |
| 233 | 2186.1 | 8439.4 | 6024.4 |
| 234 | 4103.9 | 4096.9 | 2220.2 |
| 237 | 2135.4 | 2822 | 2492.3 |
| 238 | 804.5 | 1538.6 | 1454.7 |
| 245 | 897.9 | 2276.6 | 1348.2 |
| 250 | 1466.4 | 1301.3 | 1865.3 |
| 252 | 1357 | 1437.1 | 1141.1 |
| 264 | 631.7 | 1253.9 | 845.4 |
| 290 | 470.2 | 700.5 | 231.9 |
| 294 | 3563.9 | 4377.4 | 2734.8 |
| 296 | 1506.5 | 2423.4 | 1527.3 |
| 342 | 922.5 | 1108.1 | 605.4 |

13a2

| SEQ | Signal | | |
|---|---|---|---|
| ID | ThyMixBen_02014_40068_H133A_807TT | 02014_40198_H133A_871TT | 02014_40321_H133A_913TT |
| 2 | 1749.6 | 1571.1 | 2634.4 |
| 3 | 377.2 | 508 | 2322.7 |
| 5 | 2762.9 | 1795.8 | 6670.2 |
| 6 | 1280.1 | 2033.3 | 1910.3 |
| 9 | 3346.8 | 548.3 | 11398.5 |
| 12 | 6927.1 | 4060.5 | 6664.4 |
| 18 | 7418.9 | 14860.4 | 3134.7 |
| 22 | 1797.5 | 744.5 | 7334.3 |
| 25 | 1245.8 | 815.8 | 7201.1 |
| 28 | 301.1 | 640.8 | 1325.9 |
| 32 | 2992.4 | 3260.2 | 3588.1 |
| 39 | 435.8 | 958.1 | 1152.1 |
| 74 | 689.2 | 1453.7 | 491.7 |
| 78 | 160.1 | 383 | 151.2 |
| 143 | 1338.8 | 1466.6 | 1069.9 |
| 174 | 2464.3 | 1616.3 | 829.8 |
| 175 | 1701 | 1511.5 | 1101.1 |
| 191 | 763.6 | 2383.3 | 2013.2 |
| 212 | 481 | 1131.9 | 912.5 |
| 222 | 280.8 | 1574 | 4944.1 |
| 233 | 1289.5 | 1272.4 | 6285.6 |
| 234 | 1645.4 | 3271.1 | 2263.3 |
| 237 | 1732.6 | 879.6 | 3780 |
| 238 | 493.5 | 893.1 | 1098.7 |
| 245 | 661.9 | 1378.3 | 1244.1 |
| 250 | 736.7 | 1305.6 | 633 |
| 252 | 1145.8 | 1986 | 1203.2 |
| 264 | 462.7 | 891.3 | 629.4 |
| 290 | 295.8 | 697.1 | 987.8 |
| 294 | 1909.1 | 1128.4 | 924.1 |
| 296 | 898.4 | 1232.2 | 925.1 |
| 342 | 482.4 | 712.6 | 476.1 |

| SEQ | Signal | | |
|---|---|---|---|
| ID | 02014_40322_H133A_914TT | 02014_40323_H133A_915TT | 02014_40324_H133A_917TT |
| 2 | 2419.2 | 2697.4 | 2901.1 |
| 3 | 259.8 | 1123.4 | 875.2 |
| 5 | 2094.7 | 11425.7 | 4957.2 |
| 6 | 2543.7 | 2173.2 | 1358.7 |
| 9 | 953.4 | 2085.2 | 10684.4 |
| 12 | 2730.5 | 4322.8 | 2616.2 |
| 18 | 26576.3 | 9585.4 | 8588.9 |
| 22 | 317.9 | 5120.1 | 8611.7 |
| 25 | 253.7 | 2882.9 | 1053.4 |
| 28 | 409.2 | 762.7 | 838.8 |
| 32 | 792.5 | 5413.2 | 2581 |
| 39 | 499.6 | 556.9 | 898.6 |
| 74 | 736.6 | 986.9 | 1217 |
| 78 | 172.9 | 597.4 | 745.6 |
| 143 | 2070.9 | 2377.2 | 1976.3 |
| 174 | 1365.2 | 4938 | 4804.3 |
| 175 | 2325.4 | 2530.2 | 2237.6 |
| 191 | 1274.2 | 601.2 | 1100.2 |
| 212 | 663.2 | 666.4 | 1081 |
| 222 | 342.2 | 1225.9 | 449 |
| 233 | 866.8 | 1839.3 | 5797.4 |
| 234 | 1789.3 | 6497.4 | 3416 |
| 237 | 1345.3 | 2154.2 | 2802.8 |
| 238 | 405.9 | 592.8 | 1326.4 |
| 245 | 645.4 | 1124.2 | 1171.1 |
| 250 | 1409.4 | 1368.9 | 1146.7 |
| 252 | 1323.5 | 1544.6 | 757 |
| 264 | 649.7 | 872.1 | 1319.5 |
| 290 | 819.9 | 440.6 | 268.7 |
| 294 | 1519.2 | 3225.3 | 2954.9 |
| 296 | 1290.3 | 738.1 | 1069.6 |
| 342 | 694.8 | 801.2 | 605.7 |

13a3

| SEQ | Signal | | |
|---|---|---|---|
| ID | 02014_40325_H133A_918TT | 02014_40326_H133A_919TT | ThyFolBen_02014_40079_H133A_818TT |
| 2 | 3457.7 | 2769.1 | 4234.5 |
| 3 | 920.5 | 1289.3 | 627 |
| 5 | 1805.2 | 5184.1 | 1487.2 |
| 6 | 1560.8 | 1519.3 | 996.2 |
| 9 | 11354.8 | 9921.9 | 3894 |
| 12 | 7531.7 | 6887.2 | 1379.1 |
| 18 | 8220.1 | 5452.2 | 7762.8 |
| 22 | 4750.8 | 5739.1 | 5655.3 |
| 25 | 1557.9 | 3017.5 | 1200.4 |
| 28 | 886.6 | 1189.2 | 731.4 |
| 32 | 4134.1 | 10964.4 | 927.6 |
| 39 | 1259.2 | 1022.1 | 1423.7 |
| 74 | 741.8 | 948.9 | 770 |
| 78 | 447.9 | 488.2 | 790.6 |
| 143 | 3165.1 | 1865.5 | 2330.7 |
| 174 | 607.5 | 2151.8 | 4026.2 |
| 175 | 5358.5 | 2402.7 | 3765.6 |
| 191 | 2685.9 | 1183.6 | 1661.4 |
| 212 | 1306.3 | 1072.1 | 2181.8 |
| 222 | 2332.8 | 431.2 | 1015.6 |
| 233 | 5181.8 | 12377 | 3400.9 |
| 234 | 3760.2 | 1988.2 | 3527.4 |
| 237 | 2712 | 3073.8 | 1930.6 |
| 238 | 1552.2 | 1636.1 | 1333.5 |
| 245 | 1722.2 | 1981.5 | 1978.8 |
| 250 | 1502.7 | 1094 | 1083.3 |
| 252 | 1609.9 | 1679.3 | 1599.4 |
| 264 | 860.1 | 835.6 | 1451.1 |
| 290 | 773.4 | 490.4 | 218.3 |
| 294 | 555.3 | 2490.7 | 1854.9 |
| 296 | 1240.1 | 1863 | 1139.6 |
| 342 | 738.7 | 509.3 | 1018.4 |

| SEQ | Signal | | |
|---|---|---|---|
| ID | ThyFolBen_02014_40080_H133A_819TT | ThyFolBen_02014_40081_H133A_820TT | ThyFolBen_02014_40082_H133A_821TT |
| 2 | 5589.2 | 3035.3 | 2681.6 |
| 3 | 690.9 | 585.4 | 610 |
| 5 | 1942 | 2663.8 | 1231.8 |
| 6 | 1140.3 | 2093.4 | 841.6 |
| 9 | 2165.4 | 7467 | 7685.6 |
| 12 | 1292.4 | 5085.1 | 3585.9 |
| 18 | 7277.4 | 5374.9 | 2379.1 |
| 22 | 7618.6 | 6227.9 | 1551.9 |
| 25 | 881.1 | 1279.8 | 406.4 |
| 28 | 681.6 | 1225.7 | 473.9 |
| 32 | 3075.2 | 2775 | 608.8 |
| 39 | 1632.9 | 899.5 | 688.9 |
| 74 | 674.6 | 1139.7 | 213 |
| 78 | 602.8 | 776.3 | 332.1 |
| 143 | 1160.7 | 1676 | 1672.4 |
| 174 | 4702.6 | 10677.1 | 3826.8 |
| 175 | 1231.9 | 2531.9 | 2307.7 |
| 191 | 1657.1 | 1377.8 | 368.2 |
| 212 | 2035.6 | 954.2 | 1663.4 |
| 222 | 1651.7 | 3755.4 | 1669.9 |
| 233 | 4679.3 | 2476 | 1506.6 |
| 234 | 3971.4 | 4526.5 | 997.6 |
| 237 | 3521.8 | 2951.3 | 2673.5 |
| 238 | 837.6 | 1069.7 | 1860.5 |
| 245 | 2170 | 763.6 | 1392.9 |
| 250 | 710.8 | 864.9 | 1823.2 |
| 252 | 1463.9 | 1199.9 | 1019.2 |
| 264 | 1315.6 | 1221.6 | 936.8 |
| 290 | 507.2 | 648.3 | 294.6 |
| 294 | 2997.4 | 7108.2 | 2160.7 |
| 296 | 1245.4 | 1172.5 | 1318.3 |
| 342 | 728.8 | 977.2 | 710.6 |

13a4

| SEQ | Signal | | |
|---|---|---|---|
| ID | ThyFolBen_02014_40083_H133A_822TT | fa_EA40173_VDX842TT | fa_EA40191_VDX862TT |
| 2 | 3403.4 | 3423.5 | 2246.6 |
| 3 | 644.4 | 950.1 | 1313.2 |
| 5 | 3439.5 | 754.3 | 2119 |
| 6 | 1373.7 | 987.7 | 834.7 |
| 9 | 7457.5 | 2730.9 | 9307.8 |
| 12 | 3978.9 | 9462.8 | 777.5 |
| 18 | 6386.9 | 1591.2 | 9546.6 |
| 22 | 2652.5 | 7124.7 | 11054.7 |
| 25 | 1887.7 | 470.8 | 703.9 |
| 28 | 548.5 | 562.4 | 596.8 |
| 32 | 4425.5 | 2120.3 | 1084.1 |
| 39 | 1103.1 | 1110.2 | 898.4 |
| 74 | 285.9 | 895.8 | 532.1 |
| 78 | 643.1 | 346.6 | 533.3 |
| 143 | 1979.9 | 3302.9 | 1686.6 |
| 174 | 5408.1 | 608.2 | 5072.8 |
| 175 | 2650.3 | 6596.8 | 2600.8 |
| 191 | 667.7 | 2665.7 | 1382.1 |
| 212 | 1357.8 | 2545.2 | 1590.2 |
| 222 | 2239.9 | 471 | 548.8 |
| 233 | 7318.7 | 11617.9 | 10868.4 |
| 234 | 2395.9 | 2832.7 | 6005.3 |
| 237 | 2275.3 | 2639.3 | 2406.6 |
| 238 | 1181.8 | 2124.4 | 1586.7 |
| 245 | 2082.5 | 2302.1 | 2846.4 |
| 250 | 1684 | 1718 | 862.9 |
| 252 | 1166.7 | 1579.6 | 590.4 |
| 264 | 654.2 | 1604.2 | 3062.9 |
| 290 | 342 | 431.8 | 458.8 |
| 294 | 2978.3 | 651.5 | 3533.7 |
| 296 | 2132.4 | 1762.9 | 815.3 |
| 342 | 1058.5 | 488.3 | 475.4 |

| SEQ | Signal | | |
|---|---|---|---|
| ID | fa_EA40192_VDX863TT | fa_EA40193_VDX864TT | fa_EA40194_VDX865TT |
| 2 | 2723.3 | 4130.4 | 2828.3 |
| 3 | 344.4 | 1731.1 | 2576.9 |
| 5 | 3324.7 | 1663.9 | 4423 |
| 6 | 1399.9 | 1115.4 | 1872.1 |
| 9 | 7048.5 | 3775.7 | 6931.3 |
| 12 | 4280.8 | 4821 | 2268.2 |
| 18 | 4979.5 | 5005.2 | 4409.5 |
| 22 | 4669.9 | 4776.9 | 5782.5 |
| 25 | 714.5 | 445.9 | 698.2 |
| 28 | 915.9 | 1194.1 | 1041 |
| 32 | 2638.9 | 2593.1 | 1919.9 |
| 39 | 1375.1 | 1520.4 | 1744.1 |
| 74 | 841.2 | 1938.6 | 1109.5 |
| 78 | 680.5 | 621.5 | 385.8 |
| 143 | 2406.6 | 2255.4 | 3419.1 |
| 174 | 5907.1 | 2956.1 | 2670.2 |
| 175 | 4704.8 | 3123 | 5286.8 |
| 191 | 740.2 | 1133.3 | 3678.2 |
| 212 | 1326.3 | 1135.1 | 1079 |
| 222 | 584.1 | 899.4 | 1002.2 |
| 233 | 6925.9 | 5416.9 | 14212.9 |
| 234 | 2493.8 | 2128.8 | 6818.7 |
| 237 | 2595.1 | 1857.2 | 2546.1 |
| 238 | 2125.3 | 2039.5 | 1859.1 |
| 245 | 2280.8 | 3973.8 | 1520.6 |
| 250 | 2782.6 | 1973.4 | 1594.3 |
| 252 | 1623.2 | 1735.2 | 1584.3 |
| 264 | 1460.8 | 1510.1 | 2018.9 |
| 290 | 602.3 | 745 | 977.6 |
| 294 | 4065.9 | 2720.4 | 2292.8 |
| 296 | 1040.3 | 1787.6 | 932.6 |
| 342 | 759.3 | 658.3 | 851.2 |

13a5

| SEQ | Signal | | |
|---|---|---|---|
| ID | fa_EA40195_VDX866TT | fa_EA40196_VDX867TT | fa_EA40197_VDX869TT |
| 2 | 3243.6 | 2969.9 | 3761.4 |
| 3 | 728.9 | 548.2 | 531.1 |
| 5 | 2392.7 | 6268.7 | 3870.9 |
| 6 | 1534 | 965.4 | 2782.8 |
| 9 | 8238.3 | 8829.9 | 4175.6 |
| 12 | 3334.6 | 2752 | 3382.5 |
| 18 | 9146.3 | 8150.5 | 7796.3 |
| 22 | 4665.5 | 8163.5 | 3812 |
| 25 | 555.6 | 524.6 | 1592.8 |
| 28 | 1115.3 | 604 | 918.9 |
| 32 | 1089.3 | 1808.7 | 1245.6 |
| 39 | 1606.8 | 1418.2 | 1392.4 |
| 74 | 638.2 | 2085.2 | 694.7 |
| 78 | 480.6 | 603.6 | 959.8 |
| 143 | 3003 | 2033.2 | 3441.7 |
| 174 | 3322 | 4573.5 | 4168.2 |
| 175 | 4747.7 | 2573.2 | 5834.5 |
| 191 | 2724.1 | 726 | 831.2 |
| 212 | 2362.7 | 1705.9 | 2344.8 |
| 222 | 271.7 | 2039.4 | 683.4 |
| 233 | 10892.9 | 6981.9 | 10048.5 |
| 234 | 4015.4 | 3229.5 | 4734.4 |
| 237 | 2159.9 | 2415.2 | 2194.8 |
| 238 | 1451 | 1111.6 | 1037.4 |
| 245 | 2059.1 | 2548.6 | 2180.9 |
| 250 | 3534.3 | 993.3 | 2513.3 |
| 252 | 1589.8 | 1334.1 | 2762.4 |
| 264 | 1335.1 | 1560.1 | 1656.9 |
| 290 | 496.3 | 626.2 | 584.9 |
| 294 | 2869.4 | 4842.4 | 2762.9 |
| 296 | 1414.4 | 882.4 | 1284 |
| 342 | 595.6 | 660.6 | 1442.5 |
| SEQ | Signal | | |
| ID | fa_EA40219_VDX907TT | fa_EA40220_VDX908TT | 02014_40327_H133A_920TT |
| 2 | 3352.1 | 2486.7 | 3109.7 |
| 3 | 796 | 1204.6 | 981.6 |
| 5 | 10216 | 3635.2 | 11319.3 |
| 6 | 2638.6 | 1155.7 | 2100.9 |
| 9 | 1650.4 | 7363.2 | 3172 |
| 12 | 3589.1 | 6717.7 | 3191.1 |
| 18 | 8021.5 | 8185 | 8907.1 |
| 22 | 4001.7 | 5539.5 | 6346.7 |
| 25 | 2057.7 | 4103.3 | 886.1 |
| 28 | 1190.9 | 999.1 | 998.2 |
| 32 | 4202 | 7454.6 | 1100.2 |
| 39 | 1443.3 | 949.8 | 1388.7 |
| 74 | 1778.1 | 557.7 | 1486.9 |
| 78 | 1000.3 | 476 | 721.1 |
| 143 | 3224.1 | 2461.3 | 2701.2 |
| 174 | 5982 | 3022.2 | 5710.7 |
| 175 | 4666.3 | 3540.8 | 3751 |
| 191 | 1991.3 | 1556.8 | 643.4 |
| 212 | 1259.8 | 1288.5 | 1033.6 |
| 222 | 1370.8 | 728.8 | 1675.2 |
| 233 | 6773.9 | 15803 | 3520.9 |
| 234 | 7233.3 | 2712.8 | 8148.3 |
| 237 | 2990.7 | 2565.8 | 2364 |
| 238 | 914.9 | 1634.9 | 1078.9 |
| 245 | 2093.2 | 1730 | 1329.4 |
| 250 | 878.9 | 686.3 | 980.4 |
| 252 | 1267.3 | 1857.6 | 1608.2 |
| 264 | 942.7 | 950.4 | 1076.1 |
| 290 | 549.5 | 309.7 | 613.4 |
| 294 | 4119.2 | 2299.8 | 3497.8 |
| 296 | 1106.4 | 1493.4 | 888.5 |
| 342 | 1050.3 | 607.5 | 1278.6 |

13a6

| SEQ | Signal | | |
|---|---|---|---|
| ID | 02014_40332_H133A_938TT | 02014_40334_H133A_941TT | 02014_40335_H133A_940TT |
| 2 | 1963.7 | 2662.2 | 2416.5 |
| 3 | 942.5 | 342 | 749.1 |
| 5 | 2218 | 3903.1 | 3011.1 |
| 6 | 939.5 | 1239.9 | 1853.8 |
| 9 | 5245.3 | 1988.9 | 1165.8 |
| 12 | 2500.4 | 2100 | 3597.7 |
| 18 | 5929.7 | 7819.7 | 5335.4 |
| 22 | 2265.8 | 6298.2 | 2112.7 |
| 25 | 1160.2 | 916.5 | 614.7 |
| 28 | 617.6 | 408.5 | 740.7 |
| 32 | 2918.8 | 3242.3 | 3083.9 |
| 39 | 1356.6 | 876.8 | 1855 |
| 74 | 1102.1 | 826.7 | 1384.4 |
| 78 | 361.5 | 383.5 | 482.7 |
| 143 | 1394.9 | 2889.2 | 1838.1 |
| 174 | 2198.3 | 1887.5 | 3921.8 |
| 175 | 1391.4 | 3677.8 | 2169.3 |
| 191 | 1235.1 | 364.7 | 1283.5 |
| 212 | 1625.4 | 871.1 | 1083.8 |
| 222 | 503.4 | 638.5 | 320.1 |
| 233 | 8499.4 | 1999.9 | 4012.1 |
| 234 | 2067.7 | 2973.7 | 2630.4 |
| 237 | 2763.1 | 1501.1 | 2724 |
| 238 | 1055.6 | 1055.7 | 1596.5 |
| 245 | 751.4 | 1076.1 | 915.2 |
| 250 | 1050.6 | 1474.3 | 2517.1 |
| 252 | 987.8 | 1382.5 | 2070.7 |
| 264 | 1278.3 | 1261.1 | 826.2 |
| 290 | 786.4 | 936.8 | 952.1 |
| 294 | 2197.5 | 2064.7 | 2836.2 |
| 296 | 635.2 | 572.8 | 700.9 |
| 342 | 718.6 | 866.8 | 735.7 |

| SEQ | Signal | | |
|---|---|---|---|
| ID | EA02014_40374_H133A_921TT | EA02014_40376_H133A_923TT | EA02014_40377_H133A_924TT |
| 2 | 3047.7 | 2043.6 | 3322 |
| 3 | 1300.6 | 549.3 | 1182 |
| 5 | 1669.8 | 1508.3 | 1453.3 |
| 6 | 837.7 | 1477.8 | 1129.4 |
| 9 | 4137 | 8735.7 | 4453.3 |
| 12 | 5716.2 | 6694.6 | 3667.8 |
| 18 | 4017.5 | 2899.7 | 5013.3 |
| 22 | 3386.6 | 4519.5 | 4186.6 |
| 25 | 1055.5 | 1184.4 | 828.4 |
| 28 | 477.3 | 701.3 | 550.8 |
| 32 | 1411.4 | 4079.5 | 2063.5 |
| 39 | 1231.3 | 982.1 | 1248 |
| 74 | 296.9 | 632.9 | 787.7 |
| 78 | 578.5 | 351.8 | 389.9 |
| 143 | 1776 | 1563 | 3881.9 |
| 174 | 3076.4 | 1858.1 | 1967.3 |
| 175 | 2169 | 2397.2 | 5896.8 |
| 191 | 616.4 | 1037.7 | 1957 |
| 212 | 1086.2 | 1450.7 | 981.1 |
| 222 | 1707.8 | 1089.4 | 640.8 |
| 233 | 3345.8 | 10991.6 | 11095.5 |
| 234 | 2027.1 | 1597 | 3240 |
| 237 | 1997.9 | 2249.3 | 2941.1 |
| 238 | 1035.6 | 1810.9 | 1257.5 |
| 245 | 2714.4 | 2120.1 | 1553.6 |
| 250 | 1428.1 | 1169.4 | 2857.1 |
| 252 | 881.9 | 1589.3 | 2217.2 |
| 264 | 865.3 | 1055.9 | 1034.7 |
| 290 | 312.4 | 385.7 | 1231.1 |
| 294 | 2573.5 | 1835.4 | 2657.6 |
| 296 | 1768.2 | 1426.3 | 2462.5 |
| 342 | 770.7 | 565.3 | 1695.1 |

13a7

| SEQ | EA02014_Signal | | |
|---|---|---|---|
| ID | 40378_H133A_925TT | 40379_H133A_926TT | 40380_H133A_927TT |
| 2 | 3274 | 3025.4 | 2424.9 |
| 3 | 1545.1 | 1151.1 | 687.6 |
| 5 | 3661.8 | 1323.2 | 7949.9 |
| 6 | 1371.5 | 1220.8 | 1831 |
| 9 | 10387.7 | 11670.1 | 6402.7 |
| 12 | 5829.9 | 6903.8 | 4783.9 |
| 18 | 6648 | 4053.1 | 7410.2 |
| 22 | 6859.7 | 6621.2 | 3008.1 |
| 25 | 1035.6 | 3448.2 | 1347.1 |
| 28 | 1087 | 917.1 | 747.8 |
| 32 | 5212.9 | 6841.6 | 3282.5 |
| 39 | 1228.7 | 1245.7 | 762.4 |
| 74 | 823.9 | 721.6 | 1460.4 |
| 78 | 713.8 | 377.6 | 621.3 |
| 143 | 1953.5 | 2925.7 | 2861.8 |
| 174 | 3029 | 1818.4 | 5264.1 |
| 175 | 3229.1 | 4827.2 | 3821.1 |
| 191 | 1112.4 | 5308.2 | 841 |
| 212 | 890.9 | 915.6 | 729.1 |
| 222 | 480.1 | 2895.3 | 605.6 |
| 233 | 6680.7 | 9190.5 | 2236.9 |
| 234 | 1871.2 | 4194.1 | 4428.8 |
| 237 | 2758.4 | 2108.7 | 2070.1 |
| 238 | 1210.7 | 1289.5 | 774.3 |
| 245 | 2369.7 | 1585.8 | 785.1 |
| 250 | 971.8 | 1387.3 | 1193.5 |
| 252 | 1417.1 | 990.9 | 1186.9 |
| 264 | 1089.9 | 538.3 | 758.6 |
| 290 | 565.1 | 601.8 | 485.3 |
| 294 | 2574.6 | 1541.3 | 3862.3 |
| 296 | 1821.8 | 1115.3 | 1015.1 |
| 342 | 621 | 757.4 | 791.6 |
| SEQ | EA02014_Signal | | |
| ID | 40387_H133A_955TT | 40388_H133A_956TT | 40389_H133A_957TT |
| 2 | 2302.6 | 2724.6 | 2641.3 |
| 3 | 424.7 | 420.6 | 609.2 |
| 5 | 4860 | 4059.3 | 4895.3 |
| 6 | 2330.9 | 1642.8 | 1963.8 |
| 9 | 3105.3 | 4256.6 | 8744.8 |
| 12 | 2874.5 | 3494.1 | 2451 |
| 18 | 4600.2 | 3912.9 | 16235.3 |
| 22 | 1369.9 | 2480.5 | 4685 |
| 25 | 365.3 | 1587.2 | 816.8 |
| 28 | 1057 | 1169.8 | 974.1 |
| 32 | 2814.2 | 4083.1 | 8121.2 |
| 39 | 904.9 | 1136.2 | 1862.7 |
| 74 | 2781.4 | 970.2 | 839 |
| 78 | 212.8 | 421.3 | 891.4 |
| 143 | 1243.3 | 2335.1 | 2564.3 |
| 174 | 3925.2 | 4789.1 | 4553.5 |
| 175 | 1561.7 | 4603.8 | 4098.3 |
| 191 | 861.6 | 865.2 | 1964.9 |
| 212 | 1264.1 | 1494.2 | 1177.2 |
| 222 | 145.2 | 425.3 | 1712.4 |
| 233 | 441.5 | 3626.6 | 11326.8 |
| 234 | 1260.8 | 1599 | 4627.7 |
| 237 | 1655.9 | 2140.3 | 2820.6 |
| 238 | 1017.9 | 1645.6 | 1150.6 |
| 245 | 1808.4 | 2014.9 | 1185.6 |
| 250 | 2014.8 | 2033 | 608.6 |
| 252 | 1561.4 | 2006.1 | 1838 |
| 264 | 1340.4 | 1171.9 | 933.1 |
| 290 | 597.5 | 511.7 | 852.7 |
| 294 | 2639.9 | 3968.8 | 3955.7 |
| 296 | 1379.4 | 1444.1 | 867.3 |
| 342 | 504.5 | 671.6 | 1320.3 |

13a8

| SEQ | Signal | | |
|---|---|---|---|
| ID | EA02014_40390_H133A_959T | EA02014_40391_H133A_960TT | EA02014_40392_H133A_961TT |
| 2 | 1817.9 | 1937.6 | 2632.3 |
| 3 | 605.6 | 546.8 | 697.5 |
| 5 | 8452.7 | 11532.9 | 5852.5 |
| 6 | 2508.7 | 1035.1 | 1581.2 |
| 9 | 1557.3 | 17159.3 | 4950.2 |
| 12 | 8423.6 | 3364.4 | 3626.3 |
| 18 | 9560.7 | 5478.7 | 8997.6 |
| 22 | 5745.2 | 8584.6 | 5849.4 |
| 25 | 2003.7 | 619.6 | 797.7 |
| 28 | 1280.7 | 1023.3 | 810.5 |
| 32 | 5819.5 | 1430 | 6760.1 |
| 39 | 844.6 | 1193.7 | 2035 |
| 74 | 1794.4 | 871.9 | 1342.7 |
| 78 | 1290.5 | 705.2 | 582.1 |
| 143 | 3606.5 | 1206.5 | 2610 |
| 174 | 5367.9 | 3197 | 2890.4 |
| 175 | 6112 | 1232.1 | 3258.2 |
| 191 | 628.6 | 681.7 | 1024.6 |
| 212 | 762 | 850.9 | 1201 |
| 222 | 3380.6 | 2257.2 | 1397.9 |
| 233 | 1273.2 | 3459.2 | 5807.2 |
| 234 | 4522.8 | 4556.7 | 4306.9 |
| 237 | 1813.8 | 2740.9 | 2387.6 |
| 238 | 1451 | 897.7 | 1411.1 |
| 245 | 841.7 | 1542 | 1434.2 |
| 250 | 834.9 | 839.6 | 1111.7 |
| 252 | 1612 | 1068.9 | 1122.2 |
| 264 | 1720.7 | 1090.3 | 766.9 |
| 290 | 548.7 | 268.4 | 292.1 |
| 294 | 4894.2 | 2878.6 | 1768.4 |
| 296 | 1074.9 | 850.9 | 729.8 |
| 342 | 1199.4 | 802.1 | 874.5 |

| SEQ | Signal | | |
|---|---|---|---|
| ID | EA02014_40393_H133A_962TT | ThyPapCan_02014_40090_H133A_829TT | ThyPapCan_02014_40091_H133A_830TT@IC |
| 2 | 2613.7 | 2167.7 | 1372.7 |
| 3 | 480.4 | 1793.5 | 1236.1 |
| 5 | 5194.8 | 3735.8 | 2822.7 |
| 6 | 1561.5 | 1568.4 | 1723.3 |
| 9 | 1272.3 | 3597.7 | 3243.8 |
| 12 | 1198.7 | 5938.4 | 3878.6 |
| 18 | 4601.2 | 6673.3 | 6322.9 |
| 22 | 2275.2 | 4413.3 | 2539.9 |
| 25 | 887.6 | 2860.8 | 3257.2 |
| 28 | 604.5 | 703.2 | 592.2 |
| 32 | 736.3 | 5057.7 | 6877.1 |
| 39 | 1643.1 | 906.4 | 977.6 |
| 74 | 1207.3 | 873.7 | 438.1 |
| 78 | 644.6 | 514.2 | 463 |
| 143 | 3369.8 | 2462.6 | 1861.9 |
| 174 | 2641.3 | 4481.7 | 4198.6 |
| 175 | 5085.3 | 3246.9 | 2442.8 |
| 191 | 538.5 | 913.3 | 723.7 |
| 212 | 690.9 | 797.9 | 784 |
| 222 | 127.7 | 892.4 | 646.7 |
| 233 | 1846.1 | 4170.6 | 4565.3 |
| 234 | 2687.8 | 3024.6 | 3006.1 |
| 237 | 1999.7 | 1879.2 | 1708 |
| 238 | 1416.3 | 966.6 | 803.6 |
| 245 | 1628.4 | 1415.8 | 1521.5 |
| 250 | 2545.8 | 1268.4 | 993.6 |
| 252 | 1770.9 | 1379.1 | 1201.1 |
| 264 | 838.8 | 728.4 | 1170.1 |
| 290 | 366.4 | 284.9 | 221.6 |
| 294 | 2181.6 | 2628.2 | 1888.8 |
| 296 | 975.7 | 1061.8 | 946.4 |
| 342 | 1428.7 | 842.7 | 661 |

13a9

| SEQ | ThyPapCan_02014_. . . Signal | | |
|---|---|---|---|
| ID | 40092_H133A_831TT | 40093_H133A_832TT | 40095_H133A_834TT |
| 2 | 2960.8 | 3724.8 | 3502.5 |
| 3 | 1034.7 | 1002.2 | 539.6 |
| 5 | 1648.6 | 2929.1 | 3651.5 |
| 6 | 1182.8 | 1644.7 | 1603.7 |
| 9 | 1637.6 | 5720.9 | 3045.3 |
| 12 | 4300.1 | 3654.1 | 3555.9 |
| 18 | 6335.8 | 3922.6 | 3579.6 |
| 22 | 3973 | 4533 | 5478.5 |
| 25 | 7110.3 | 2680 | 2117.2 |
| 28 | 550.3 | 1205.7 | 660.4 |
| 32 | 3476.1 | 8075.3 | 2580 |
| 39 | 973.9 | 1322.9 | 1283.6 |
| 74 | 611.8 | 1044.9 | 1510.9 |
| 78 | 179.8 | 404.5 | 344.8 |
| 143 | 2333.5 | 2803.8 | 3730.7 |
| 174 | 2628.9 | 5254.6 | 2333.9 |
| 175 | 3237.9 | 5586.3 | 5010.7 |
| 191 | 3519.9 | 1826.9 | 1761.9 |
| 212 | 957 | 1085.3 | 1218.4 |
| 222 | 3373.3 | 1016 | 723.7 |
| 233 | 11130.3 | 16096.3 | 16100.3 |
| 234 | 2382.4 | 2253.4 | 2236.6 |
| 237 | 2141.4 | 2712.7 | 2749.7 |
| 238 | 719.8 | 2489.2 | 1179.1 |
| 245 | 873.3 | 1325.6 | 1693 |
| 250 | 2074.6 | 1295 | 2234.8 |
| 252 | 1496.7 | 2444.6 | 2031.7 |
| 264 | 931.2 | 1035.7 | 1188 |
| 290 | 499.8 | 667.3 | 663.2 |
| 294 | 2010 | 4135.1 | 2098.4 |
| 296 | 2128.8 | 2051.6 | 2507.5 |
| 342 | 835.3 | 1453.2 | 1071.6 |

| SEQ | ThyPapCan_02014_. . . Signal | | |
|---|---|---|---|
| ID | 40096_H133A_835TT | 40097_H133A_836TT | 40098_H133A_837TT@I2 |
| 2 | 2185.5 | 2399.1 | 2900.3 |
| 3 | 891.3 | 452.9 | 1885.7 |
| 5 | 1611.8 | 3731.1 | 3572.5 |
| 6 | 966.3 | 2282.6 | 1818.1 |
| 9 | 1451 | 5197.6 | 7768.2 |
| 12 | 3946.6 | 2299 | 2877.5 |
| 18 | 3282.2 | 3591.8 | 9567 |
| 22 | 2546.7 | 2145.4 | 7779.3 |
| 25 | 5212.6 | 869.3 | 8325.2 |
| 28 | 730.8 | 642.1 | 734.4 |
| 32 | 2524.9 | 2454.3 | 7864.8 |
| 39 | 847.1 | 1328.7 | 1793.3 |
| 74 | 831.5 | 519.6 | 513.4 |
| 78 | 133.7 | 582.7 | 482.5 |
| 143 | 2073.1 | 2033.9 | 3437.3 |
| 174 | 922.6 | 5487.5 | 2544 |
| 175 | 2460.9 | 2800.9 | 4480.6 |
| 191 | 1360.1 | 531.4 | 2426.7 |
| 212 | 764.9 | 1307.9 | 1161.5 |
| 222 | 3010.1 | 829.7 | 1642.5 |
| 233 | 10534.6 | 2873.8 | 13024.1 |
| 234 | 842.4 | 1767 | 3577 |
| 237 | 2120.8 | 2269.8 | 2385.2 |
| 238 | 806.1 | 1516.4 | 1336.1 |
| 245 | 870.8 | 1916.1 | 1869.5 |
| 250 | 1654.7 | 2588.9 | 1104.7 |
| 252 | 1605.8 | 1808.1 | 1897.2 |
| 264 | 746.7 | 1074.1 | 1170.2 |
| 290 | 626.9 | 634.4 | 625.8 |
| 294 | 1207.1 | 3722.1 | 2055.4 |
| 296 | 2156.5 | 1001 | 2034.3 |
| 342 | 615.5 | 1084 | 1209 |

13a10

| SEQ | Signal | | |
|---|---|---|---|
| ID | ThyPapCan_02014_40099_H133A_838TT@I2 | 02014_40317_H133A_839TT | pc_EA40200_VDX879TT |
| 2 | 3540.3 | 1657 | 3331 |
| 3 | 1796.3 | 750.6 | 1334.9 |
| 5 | 4954 | 2602 | 3011.2 |
| 6 | 2558.4 | 1246.9 | 1008.5 |
| 9 | 4538 | 3328.9 | 1097.2 |
| 12 | 2544 | 6420.6 | 5055.9 |
| 18 | 9287.1 | 5085 | 6074.5 |
| 22 | 5415.4 | 3850 | 3537 |
| 25 | 12197.9 | 1296 | 3368.6 |
| 28 | 915.5 | 631 | 842.7 |
| 32 | 4804.9 | 3883.4 | 3039.3 |
| 39 | 1409.2 | 756 | 1855 |
| 74 | 992.8 | 349.3 | 597.9 |
| 78 | 352 | 259.9 | 342.4 |
| 143 | 4199.6 | 1314.8 | 2573.1 |
| 174 | 3924.5 | 1399.1 | 5622.6 |
| 175 | 6697.7 | 1590 | 4211.2 |
| 191 | 3745.9 | 816.2 | 4875.5 |
| 212 | 1219.1 | 1064.8 | 1480.3 |
| 222 | 8593.9 | 434.6 | 1994.5 |
| 233 | 20899.6 | 4657 | 37907.7 |
| 234 | 3763.9 | 1496.4 | 3667.8 |
| 237 | 2711.1 | 2046.9 | 1892.2 |
| 238 | 994.1 | 1047.3 | 1092.4 |
| 245 | 1339.1 | 1019.4 | 2826.7 |
| 250 | 1736 | 710.8 | 2570.5 |
| 252 | 2933.1 | 1316.3 | 1849.2 |
| 264 | 1426.6 | 987 | 2826.4 |
| 290 | 666.3 | 368.1 | 487 |
| 294 | 3175.8 | 1237.3 | 4622.7 |
| 296 | 1837.4 | 899.1 | 2639 |
| 342 | 1355.2 | 406.1 | 1662.9 |

| SEQ | Signal | | |
|---|---|---|---|
| ID | pc_EA40201_VDX881TT | pc_EA40202_VDX882TT | pc_EA40203_VDX883TT |
| 2 | 3253.1 | 3349.3 | 3642 |
| 3 | 1248.1 | 477.8 | 697.9 |
| 5 | 2106.6 | 1504.9 | 2070.9 |
| 6 | 1708.8 | 874.6 | 704.3 |
| 9 | 1789.6 | 857.2 | 1327.3 |
| 12 | 4641.7 | 3423.2 | 2283 |
| 18 | 5157.6 | 7305.1 | 5996.2 |
| 22 | 3100.8 | 2588.4 | 2125.9 |
| 25 | 4941.8 | 1669.9 | 1166.3 |
| 28 | 869.9 | 606.5 | 459.6 |
| 32 | 5722.3 | 3401.7 | 1964.8 |
| 39 | 1356 | 1421 | 1878.4 |
| 74 | 708.5 | 741.6 | 421.6 |
| 78 | 434.8 | 172.4 | 207.2 |
| 143 | 5070.9 | 4302.9 | 3455.3 |
| 174 | 4217.6 | 1231.4 | 1538.6 |
| 175 | 7931.3 | 7786.3 | 5294.6 |
| 191 | 3853.9 | 2370.5 | 1807.8 |
| 212 | 1571.7 | 1350.2 | 874.7 |
| 222 | 2235.1 | 980.8 | 748.4 |
| 233 | 22959.2 | 12092.7 | 30504.2 |
| 234 | 2431.2 | 1077.6 | 1447.8 |
| 237 | 2919 | 2374.3 | 2011.2 |
| 238 | 929.6 | 877.7 | 776.8 |
| 245 | 1538.1 | 1379.8 | 1254.9 |
| 250 | 1597.7 | 1899 | 1923.8 |
| 252 | 2395.5 | 2621 | 1992.7 |
| 264 | 1272.7 | 2511.5 | 1495.4 |
| 290 | 665.4 | 692.1 | 706 |
| 294 | 3449.7 | 976.8 | 1074.7 |
| 296 | 2217.5 | 2398.4 | 2049.3 |
| 342 | 803.3 | 1501.3 | 863 |

13a11

| SEQ | Signal | | |
|---|---|---|---|
| ID | pc_EA40204_VDX884TT | pc_EA40205_VDX885TT | pc_EA40206_VDX886TT |
| 2 | 2895.1 | 2994.7 | 3397.6 |
| 3 | 1144 | 932.3 | 1277.6 |
| 5 | 1096.3 | 1151.4 | 4943.4 |
| 6 | 916.1 | 945 | 1696.2 |
| 9 | 2396.9 | 3699.9 | 1671.3 |
| 12 | 3762.2 | 3308.4 | 3095.3 |
| 18 | 9468.3 | 6669.2 | 10475.1 |
| 22 | 3823.4 | 2813.4 | 4326.9 |
| 25 | 1322.8 | 496 | 4227.5 |
| 28 | 563.6 | 333.7 | 602.3 |
| 32 | 4985.4 | 854.7 | 1788.8 |
| 39 | 963 | 1562 | 1937.7 |
| 74 | 417 | 443.9 | 383.6 |
| 78 | 169.9 | 266.2 | 346.4 |
| 143 | 2357.9 | 2936.4 | 2961 |
| 174 | 1096.5 | 2227.9 | 1825 |
| 175 | 3559.1 | 4964.6 | 5395 |
| 191 | 5320.2 | 8526.6 | 4668.1 |
| 212 | 1168.2 | 1634.1 | 1396.4 |
| 222 | 805.9 | 739.2 | 2330.2 |
| 233 | 25920.6 | 37919.3 | 33438 |
| 234 | 1882.8 | 1513.3 | 2438.5 |
| 237 | 2950.6 | 1089.9 | 1886.5 |
| 238 | 1037.6 | 1240 | 818.8 |
| 245 | 1151.5 | 1872.7 | 2007.7 |
| 250 | 3324 | 2153.4 | 2363.7 |
| 252 | 1641 | 1236.4 | 1558.6 |
| 264 | 1120.1 | 2994.2 | 1776.5 |
| 290 | 624.5 | 516.4 | 692.1 |
| 294 | 1273.1 | 3050.2 | 1557 |
| 296 | 2601.3 | 2023.6 | 2244.2 |
| 342 | 723.2 | 973.5 | 587 |
| SEQ | Signal | | |
| ID | pc_EA40207_VDX890TT | pc_EA40208_VDX892TT | pc_EA40209_VDX893TT |
| 2 | 4328.1 | 4435.3 | 5980.3 |
| 3 | 3294.1 | 1361.2 | 475.7 |
| 5 | 1741.8 | 3416.4 | 653.5 |
| 6 | 1593.6 | 1278.6 | 740.7 |
| 9 | 1488.6 | 2591.9 | 1644.7 |
| 12 | 2865.4 | 5996.8 | 1644.2 |
| 18 | 18044.8 | 9220.2 | 11224.4 |
| 22 | 7811.1 | 7837 | 1650.1 |
| 25 | 4437.5 | 1271.9 | 878.1 |
| 28 | 782.9 | 724.2 | 636.5 |
| 32 | 2423.6 | 2099.4 | 629.4 |
| 39 | 1973.7 | 1774.1 | 1387.6 |
| 74 | 600.6 | 814.2 | 578.6 |
| 78 | 207.7 | 507.4 | 117.7 |
| 143 | 6472.6 | 4513.4 | 3395.7 |
| 174 | 1268.5 | 5715 | 380.6 |
| 175 | 12711.3 | 7961.8 | 5835.7 |
| 191 | 4129.5 | 8005 | 4597.4 |
| 212 | 1197.9 | 1161.5 | 1523.4 |
| 222 | 3890.4 | 873.8 | 1137.4 |
| 233 | 7762.1 | 23325.9 | 20940.7 |
| 234 | 4528.9 | 2232.7 | 1253.9 |
| 237 | 2930.8 | 2484.4 | 2082.4 |
| 238 | 709.9 | 1096.2 | 877.7 |
| 245 | 1316.8 | 2042.3 | 1717.4 |
| 250 | 1885.4 | 2787.9 | 3192.2 |
| 252 | 2605.7 | 1944.3 | 2613.4 |
| 264 | 1401.3 | 1517.1 | 2362.8 |
| 290 | 520.9 | 778.6 | 1209.7 |
| 294 | 1442.8 | 3564.9 | 424.1 |
| 296 | 2054.1 | 2777.3 | 4347 |
| 342 | 2028.3 | 679.8 | 746.2 |

13a12

| SEQ | Signal | | |
|---|---|---|---|
| ID | pc_EA40210_VDX894TT | 02014_40319_H133A_903TT | 02014_40320_H133A_904TT |
| 2 | 4563.8 | 3729.2 | 2859.9 |
| 3 | 475.3 | 827.4 | 4626.7 |
| 5 | 1717.5 | 3130.1 | 1505.9 |
| 6 | 698.9 | 1153.2 | 2668.3 |
| 9 | 3017.4 | 3184.7 | 6316.2 |
| 12 | 1662.3 | 4850 | 7880.2 |
| 18 | 7186 | 6997.2 | 14099 |
| 22 | 1195.2 | 3583.4 | 6058.2 |
| 25 | 587.7 | 868.9 | 28372.6 |
| 28 | 728.8 | 621.5 | 1685.2 |
| 32 | 1503.2 | 2517.7 | 19668.7 |
| 39 | 1609.6 | 1035.8 | 1140.8 |
| 74 | 240.3 | 718.9 | 623.5 |
| 78 | 196.7 | 180.1 | 370.1 |
| 143 | 1838.3 | 3062.8 | 1513.2 |
| 174 | 1548.4 | 1810.3 | 1087.6 |
| 175 | 2462.7 | 5545.8 | 1615.4 |
| 191 | 3292.3 | 2497.1 | 3479.2 |
| 212 | 1289.5 | 1230.1 | 645.1 |
| 222 | 502.2 | 315.3 | 8484.1 |
| 233 | 40786.7 | 16562 | 17697.8 |
| 234 | 1248.4 | 1443.8 | 3706.7 |
| 237 | 1286.1 | 2852.7 | 2832.7 |
| 238 | 1382.7 | 1243.2 | 990.6 |
| 245 | 2174 | 1000.7 | 703.1 |
| 250 | 2738.6 | 2792.3 | 1076.8 |
| 252 | 1078.4 | 1615.7 | 2091.1 |
| 264 | 2550.8 | 948.7 | 659.3 |
| 290 | 518.9 | 745.9 | 1057.1 |
| 294 | 1936.2 | 1348.3 | 757.5 |
| 296 | 2194.3 | 1614.6 | 1446.4 |
| 342 | 612.9 | 748.4 | 366.7 |

| SEQ | Signal | | |
|---|---|---|---|
| ID | 02014_40328_H133A_928TT | 02014_40330_H133A_932TT | 02014_40331_H133A_933TT |
| 2 | 2475.3 | 3977.2 | 3386.3 |
| 3 | 246.3 | 2009.2 | 1481.9 |
| 5 | 1737.4 | 1875.4 | 4763.8 |
| 6 | 1104 | 1295.6 | 1385.4 |
| 9 | 1911.3 | 3801.9 | 2397.6 |
| 12 | 3035 | 5874.2 | 3637.2 |
| 18 | 11077.7 | 9724.6 | 10100.8 |
| 22 | 4793.7 | 6322.5 | 4421.3 |
| 25 | 667.2 | 3526 | 4180.2 |
| 28 | 927.3 | 646.4 | 882.8 |
| 32 | 3607.7 | 1986.9 | 6399.2 |
| 39 | 1205 | 1028.3 | 1359.6 |
| 74 | 583.2 | 953 | 1021.1 |
| 78 | 543 | 465.1 | 373.7 |
| 143 | 2903.2 | 3977.3 | 3056.1 |
| 174 | 2910.3 | 3511.6 | 3939.4 |
| 175 | 4518.2 | 7011.2 | 5184.6 |
| 191 | 1085 | 5805.4 | 2286.3 |
| 212 | 1795.6 | 639 | 1130.8 |
| 222 | 1685.8 | 4996.9 | 611.8 |
| 233 | 3636.9 | 19787.1 | 4648.9 |
| 234 | 2565.5 | 2733.9 | 2463.9 |
| 237 | 2610.7 | 2178.6 | 2681.6 |
| 238 | 1636.4 | 1423.2 | 1469.2 |
| 245 | 2029.7 | 1000.1 | 1302.2 |
| 250 | 1439.3 | 3692.8 | 2113.9 |
| 252 | 2366.6 | 1895.9 | 2343.2 |
| 264 | 1351 | 811.7 | 1104.5 |
| 290 | 320.1 | 924.2 | 1016.3 |
| 294 | 2287.3 | 2252.8 | 2351.2 |
| 296 | 729.6 | 2955.6 | 1690.2 |
| 342 | 1061 | 1424.5 | 894.4 |

13a13

| SEQ | Signal | | |
|---|---|---|---|
| ID | EA02014_40375_H133A_922TT | EA02014_40381_H133A_945TT | EA02014_40382_H133A_946TT |
| 2 | 1365.7 | 2250.1 | 3658.1 |
| 3 | 935.6 | 1124.4 | 1023.9 |
| 5 | 7421.5 | 656.7 | 3000.3 |
| 6 | 1026.6 | 982.6 | 1628.3 |
| 9 | 10992.7 | 1452.2 | 2478.2 |
| 12 | 3007 | 2413.7 | 5402.5 |
| 18 | 4106.5 | 1506.8 | 9107.3 |
| 22 | 4766.3 | 5493.6 | 3034.7 |
| 25 | 900.4 | 10351.1 | 1252.1 |
| 28 | 685.8 | 1022.4 | 714.8 |
| 32 | 3099 | 1984 | 3215.8 |
| 39 | 1012.3 | 480.5 | 1173 |
| 74 | 987.5 | 61.1 | 894.2 |
| 78 | 418.8 | 111.9 | 529.1 |
| 143 | 2030.1 | 1411.5 | 3847.8 |
| 174 | 2288.4 | 269.9 | 4741.5 |
| 175 | 2412.3 | 2138.9 | 6427.7 |
| 191 | 617.2 | 983.6 | 2182.4 |
| 212 | 1018.3 | 208.9 | 1054.6 |
| 222 | 725.6 | 8103.4 | 443.9 |
| 233 | 4450.9 | 1177.3 | 20110.2 |
| 234 | 1926 | 2079.3 | 2095.5 |
| 237 | 2547.1 | 2912.4 | 3040.2 |
| 238 | 1822.6 | 264.6 | 1023.9 |
| 245 | 2699.8 | 113.4 | 1230.8 |
| 250 | 1198.1 | 249 | 1802.6 |
| 252 | 1311.3 | 613.6 | 2434.6 |
| 264 | 1364.1 | 382.4 | 1206.6 |
| 290 | 463.8 | 1223.5 | 805.1 |
| 294 | 2024.9 | 340.9 | 4085.3 |
| 296 | 1214 | 407.7 | 1761.4 |
| 342 | 619 | 828.4 | 1154.4 |

| SEQ | Signal | | |
|---|---|---|---|
| ID | EA02014_40383_H133A_947TT | EA02014_40384_H133A_948TT | ThyFolCan_02014_40084_H133A_823TT |
| 2 | 2299 | 3252.8 | 3923.8 |
| 3 | 2053.6 | 1187.9 | 1004.7 |
| 5 | 4151.2 | 1730.9 | 3450.3 |
| 6 | 1939.7 | 1023.9 | 1961.6 |
| 9 | 4581.5 | 1567.6 | 3548.1 |
| 12 | 7248.9 | 4382.6 | 6659.3 |
| 18 | 6629.5 | 9741.9 | 7072.7 |
| 22 | 4839.3 | 4984.8 | 4552 |
| 25 | 10112.4 | 3841.3 | 7385.3 |
| 28 | 1191.6 | 656.5 | 625.4 |
| 32 | 12202.3 | 3643.5 | 4762.1 |
| 39 | 1094.8 | 781.3 | 1099.1 |
| 74 | 877.1 | 629 | 887.2 |
| 78 | 188.7 | 371.9 | 650.2 |
| 143 | 2492.6 | 2091.2 | 2930.6 |
| 174 | 2231.5 | 2488.1 | 7050.3 |
| 175 | 3285.3 | 3691.4 | 4648.5 |
| 191 | 2820.3 | 2081 | 1043.3 |
| 212 | 964.8 | 771.1 | 591.5 |
| 222 | 4302.9 | 1433 | 10512.7 |
| 233 | 19683.9 | 4061.3 | 2305.1 |
| 234 | 2384.8 | 2482.7 | 6283.2 |
| 237 | 2736.1 | 3005.4 | 2681.3 |
| 238 | 929.2 | 1088.1 | 1176.9 |
| 245 | 1359.8 | 887 | 1067.6 |
| 250 | 1764.8 | 2220.8 | 1112.4 |
| 252 | 2260.9 | 1332.7 | 1526.7 |
| 264 | 1095.1 | 1210.5 | 1451.3 |
| 290 | 865.9 | 867.2 | 932.7 |
| 294 | 1859.8 | 2226.1 | 3796.8 |
| 296 | 1917.2 | 3476.1 | 1298.6 |
| 342 | 639.7 | 934.8 | 1110 |

13a14

| SEQ | Signal | | |
|---|---|---|---|
| ID | ThyFolCan_02014_40085_H133A_824TT | ThyFolCan_02014_40086_H133A_825TT | ThyFolCan_02014_40088_H133A_827TT |
| 2 | 4103.9 | 1719.4 | 2824.5 |
| 3 | 2480.6 | 144.5 | 880.5 |
| 5 | 2190.2 | 1199.7 | 4743.6 |
| 6 | 678.7 | 2589.2 | 2824.2 |
| 9 | 6166.7 | 326.1 | 5428.5 |
| 12 | 2872.9 | 1257.4 | 4087.8 |
| 18 | 2329.3 | 4765.3 | 11522.2 |
| 22 | 4848.8 | 1224.5 | 3611.1 |
| 25 | 11319.1 | 234.5 | 3308.3 |
| 28 | 772.7 | 206.8 | 830.6 |
| 32 | 2272 | 1393.6 | 5410.1 |
| 39 | 892.8 | 541.9 | 838.5 |
| 74 | 126.8 | 2071.9 | 988.3 |
| 78 | 253.6 | 307.6 | 635.6 |
| 143 | 2718.2 | 1570.7 | 2322.8 |
| 174 | 323 | 1399.8 | 2817 |
| 175 | 4437.4 | 1584 | 4411.6 |
| 191 | 2214.1 | 575.3 | 641 |
| 212 | 1667.2 | 662.2 | 577.7 |
| 222 | 13107.5 | 470.6 | 1030.1 |
| 233 | 3196 | 1087.3 | 2932.3 |
| 234 | 1659.8 | 875 | 2243.3 |
| 237 | 4693.9 | 830.4 | 3700.2 |
| 238 | 206.3 | 244.8 | 1695.9 |
| 245 | 248.7 | 425 | 1273.9 |
| 250 | 935.9 | 379.8 | 2284.4 |
| 252 | 1005.5 | 1023.3 | 1166.6 |
| 264 | 231.5 | 589 | 1480.9 |
| 290 | 638.4 | 233 | 961.8 |
| 294 | 253.4 | 1349.8 | 3087.1 |
| 296 | 1530.8 | 1570.6 | 1591.5 |
| 342 | 1457.8 | 712.8 | 1052.1 |

| SEQ | Signal | | |
|---|---|---|---|
| ID | ThyFolCan_02014_40089_H133A_828TT | 02014_40318_H133A_840TT | fc_EA40212_VDX896TT |
| 2 | 3008.4 | 2542.7 | 2391.5 |
| 3 | 497.6 | 1222.4 | 1069.4 |
| 5 | 2936.8 | 3696.7 | 776.8 |
| 6 | 1605.5 | 1411.7 | 1403.4 |
| 9 | 2131.9 | 9187.9 | 10000.2 |
| 12 | 3981.7 | 7045.4 | 3506.5 |
| 18 | 7266.2 | 3045.4 | 4683.8 |
| 22 | 6001.8 | 8784.3 | 1719.5 |
| 25 | 557.1 | 3685.8 | 383.8 |
| 28 | 1057.1 | 1256.5 | 1118.8 |
| 32 | 3330.7 | 13825 | 869 |
| 39 | 941.3 | 1041 | 3461.7 |
| 74 | 1357.4 | 696.8 | 1290.4 |
| 78 | 920.6 | 422.6 | 705.5 |
| 143 | 2621.6 | 1038.8 | 4569.2 |
| 174 | 9345.5 | 876 | 8849.8 |
| 175 | 4784.9 | 1387.4 | 7804.9 |
| 191 | 1208.4 | 1370.9 | 4609.8 |
| 212 | 1864 | 1229 | 590.6 |
| 222 | 3020.4 | 431.9 | 641.9 |
| 233 | 7081 | 12626.7 | 4567.8 |
| 234 | 1839.4 | 1328 | 7454.4 |
| 237 | 2563.5 | 3040.5 | 1008.9 |
| 238 | 2546.2 | 1614.2 | 1880.4 |
| 245 | 1215.4 | 1333.6 | 2807.1 |
| 250 | 894.4 | 867.2 | 844.3 |
| 252 | 1884.3 | 1524.6 | 678.4 |
| 264 | 1740.6 | 670.9 | 2459.5 |
| 290 | 668.6 | 430.5 | 996 |
| 294 | 7034.2 | 1137.3 | 7044.6 |
| 296 | 1110.6 | 1647.7 | 1498.9 |
| 342 | 946.9 | 436.8 | 1893.8 |

13a15

| SEQ | Signal | | |
|---|---|---|---|
| ID | fc_EA40214_VDX898TT | fc_EA40215_VDX899TT | fc_EA40216_VDX900TT |
| 2 | 2470.7 | 3328.2 | 4429.9 |
| 3 | 226.4 | 523.3 | 1216.2 |
| 5 | 1037.2 | 3614.5 | 1440.6 |
| 6 | 997 | 685.7 | 1641.1 |
| 9 | 384.9 | 1897.9 | 973.8 |
| 12 | 9940.9 | 1131.5 | 4352.5 |
| 18 | 4150.7 | 7715.2 | 5736.9 |
| 22 | 499.6 | 4466 | 2120.9 |
| 25 | 1721.2 | 1912 | 10485.2 |
| 28 | 232.1 | 706.8 | 501.4 |
| 32 | 2728.8 | 3753 | 2644.6 |
| 39 | 1006.6 | 1103.3 | 1192.6 |
| 74 | 2642.5 | 794.9 | 374.8 |
| 78 | 294.6 | 280.8 | 131.2 |
| 143 | 2141.4 | 2616.6 | 5902.7 |
| 174 | 407.1 | 2263.7 | 4270 |
| 175 | 2416.2 | 3697.7 | 9897.3 |
| 191 | 1436.8 | 2900.8 | 5153.2 |
| 212 | 839.5 | 1241.8 | 173.4 |
| 222 | 293.5 | 1318.1 | 6645.4 |
| 233 | 17314.7 | 18164.1 | 2971.6 |
| 234 | 2834.4 | 1575.6 | 3547 |
| 237 | 945.9 | 3105.6 | 1268.9 |
| 238 | 702.9 | 1189 | 744.7 |
| 245 | 914.6 | 1729.7 | 1038.5 |
| 250 | 845.9 | 2673.5 | 2175.8 |
| 252 | 1300.4 | 2454.3 | 1377.7 |
| 264 | 467.6 | 1277.4 | 638.7 |
| 290 | 573.7 | 617.2 | 993.4 |
| 294 | 507.1 | 1922.1 | 2827.1 |
| 296 | 2156.2 | 2563 | 1832.8 |
| 342 | 535.6 | 937.4 | 2261.2 |
| SEQ | Signal | | |
| ID | fc_EA40217_VDX901TT | fc_EA40218_VDX902TT | fc_EA40221_VDX909TT |
| 2 | 993.8 | 2649.9 | 4427.4 |
| 3 | 230.6 | 417 | 2364.4 |
| 5 | 3319 | 1487.4 | 9590 |
| 6 | 967.8 | 2453.4 | 2537.2 |
| 9 | 468.7 | 915.8 | 3339.3 |
| 12 | 3202.2 | 4269.6 | 15203.8 |
| 18 | 555.2 | 9139.4 | 7575.1 |
| 22 | 208.2 | 1563.8 | 1471.9 |
| 25 | 826.1 | 1002 | 6640.8 |
| 28 | 122.6 | 779.4 | 645.5 |
| 32 | 1820.8 | 3404.5 | 10045.3 |
| 39 | 880.8 | 2310.8 | 346.3 |
| 74 | 1621.8 | 1057.9 | 294 |
| 78 | 136.4 | 344.4 | 391.3 |
| 143 | 3882.4 | 3860.3 | 2140.3 |
| 174 | 2006.5 | 2076.1 | 4365.1 |
| 175 | 6489.5 | 5706.6 | 2832.4 |
| 191 | 165.9 | 963.5 | 512.1 |
| 212 | 186.6 | 451.1 | 539.9 |
| 222 | 426.3 | 623.3 | 2727.5 |
| 233 | 2885.8 | 2068.7 | 15099.5 |
| 234 | 904.6 | 3783.5 | 6440.1 |
| 237 | 2192.9 | 893.1 | 2333.7 |
| 238 | 554.4 | 383.3 | 908.6 |
| 245 | 839.4 | 784.2 | 459.1 |
| 250 | 702.9 | 1305.7 | 723.2 |
| 252 | 1061.4 | 1235.8 | 2869.5 |
| 264 | 2058 | 1076.7 | 569.3 |
| 290 | 767.4 | 1281.3 | 866.1 |
| 294 | 1753.3 | 1585.8 | 2926.6 |
| 296 | 533.7 | 2130.3 | 2647.8 |
| 342 | 1949.2 | 975.7 | 618.5 |

13a16

| SEQ | Signal | | |
|---|---|---|---|
| ID | fc_EA40222_VDX910TT | EA02014_40386_H133A_954TT | EA02014_40394_H133A_967TT |
| 2 | 2362.1 | 1417 | 1834.4 |
| 3 | 254.5 | 263.8 | 293.1 |
| 5 | 2789.1 | 8005.6 | 1358.8 |
| 6 | 1096.6 | 1050.7 | 1291.7 |
| 9 | 834.8 | 1052.4 | 2701.2 |
| 12 | 2031.6 | 4283.7 | 2805.1 |
| 18 | 9498.5 | 18893.2 | 15454.8 |
| 22 | 1449.5 | 1020 | 888.3 |
| 25 | 541.3 | 253.5 | 572.5 |
| 28 | 502.3 | 443 | 868.6 |
| 32 | 1205.9 | 7122.3 | 811.1 |
| 39 | 1215.4 | 1031.1 | 511 |
| 74 | 1385.4 | 1477.5 | 509.1 |
| 78 | 367.5 | 834.2 | 200.7 |
| 143 | 1956.7 | 1083.1 | 1486.7 |
| 174 | 4466.4 | 2823.7 | 1156.3 |
| 175 | 1799.1 | 1264 | 1758.7 |
| 191 | 560.2 | 1494 | 607.9 |
| 212 | 1046.1 | 307.8 | 548.8 |
| 222 | 248.3 | 533.1 | 1356.4 |
| 233 | 1183.6 | 612.7 | 1063.5 |
| 234 | 1886.7 | 3460.3 | 1207.2 |
| 237 | 934.6 | 933.5 | 2133.3 |
| 238 | 834.9 | 291.1 | 1034.1 |
| 245 | 1509.7 | 786.6 | 657.1 |
| 250 | 2406.8 | 1245.7 | 1247.1 |
| 252 | 1536.8 | 1182.4 | 1035.6 |
| 264 | 1315.8 | 582.8 | 1373.3 |
| 290 | 732.4 | 835.3 | 683.8 |
| 294 | 2817 | 2372.1 | 929.5 |
| 296 | 1088.4 | 1541 | 2014.6 |
| 342 | 763.6 | 866.9 | 722.2 |

| SEQ | Signal | | |
|---|---|---|---|
| ID | EA02014_40395_H133A_968TT | EA02014_40396_H133A_969TT | EA02014_40397_H133A_970TT |
| 2 | 2135.5 | 3006.2 | 1378.8 |
| 3 | 346.3 | 346.5 | 230.2 |
| 5 | 637.3 | 1214.1 | 1214.7 |
| 6 | 987.4 | 1223.8 | 2564.6 |
| 9 | 1171.4 | 6080 | 440.4 |
| 12 | 4294.1 | 4966.4 | 1686.4 |
| 18 | 2385.4 | 3575.2 | 14192.8 |
| 22 | 2585.4 | 3721.5 | 727.2 |
| 25 | 3378.9 | 709.2 | 372 |
| 28 | 378.9 | 964.1 | 341.9 |
| 32 | 2553.9 | 797 | 1753.4 |
| 39 | 722 | 2166.1 | 527.2 |
| 74 | 1159.3 | 1031.4 | 495.4 |
| 78 | 235.3 | 433.7 | 262.9 |
| 143 | 2746 | 2538.4 | 1943.7 |
| 174 | 3547.9 | 1541.5 | 2214.3 |
| 175 | 4539.5 | 3663.3 | 2264.4 |
| 191 | 2943.2 | 2727.4 | 1474.7 |
| 212 | 340.4 | 982.9 | 647 |
| 222 | 1194.2 | 1169.8 | 228.2 |
| 233 | 5528.1 | 6265.3 | 1076 |
| 234 | 2384.1 | 3860.6 | 3322.7 |
| 237 | 791 | 1890.7 | 1257.5 |
| 238 | 380.8 | 946.4 | 415 |
| 245 | 384.9 | 4773.4 | 447.6 |
| 250 | 659 | 1647.1 | 595 |
| 252 | 526.7 | 893 | 1276.7 |
| 264 | 958 | 1622.3 | 508.6 |
| 290 | 1744.3 | 523 | 850.2 |
| 294 | 2611.8 | 1279.4 | 2097.3 |
| 296 | 621.4 | 1368.3 | 981.8 |
| 342 | 559 | 594.3 | 445.9 |

13a17

| SEQ | Signal | | | | | | |
|---|---|---|---|---|---|---|---|
| ID | EA02014_40405_H133A_982TT | EA02014_40406_H133A_983TT | pb1 | pb2 | pb3 | pb4 | pb5′ |
| 2 | 3615.6 | 2106 | 204.1 | 324.2 | 178.6 | 206.6 | 249.1 |
| 3 | 765 | 372.2 | 171.5 | 303.8 | 159.1 | 61.1 | 90.2 |
| 5 | 2446.1 | 394 | 107.9 | 19.9 | 68.8 | 74.6 | 69 |
| 6 | 1051.6 | 1176 | 211.6 | 214.4 | 318.6 | 218.8 | 355.4 |
| 9 | 2059.2 | 1081.4 | 18 | 18.8 | 29.2 | 9.7 | 134 |
| 12 | 3520 | 391.5 | 11.4 | 9.1 | 9.9 | 33.8 | 8.3 |
| 18 | 4633.4 | 13339 | 94.2 | 50.7 | 67.6 | 74.9 | 29.7 |
| 22 | 6678.8 | 403.5 | 80.1 | 8.8 | 58.9 | 6.8 | 5 |
| 25 | 1229.9 | 601.5 | 197.1 | 106.7 | 65.2 | 18.7 | 87.1 |
| 28 | 778.2 | 197.6 | 11.4 | 9 | 6.6 | 11.3 | 1.7 |
| 32 | 1302.9 | 4182.6 | 8.7 | 21.6 | 30.5 | 66.1 | 64.6 |
| 39 | 2104 | 699 | 246.6 | 121.1 | 42.8 | 122.8 | 171.7 |
| 74 | 1189.7 | 1142.3 | 59.9 | 94.4 | 70.3 | 29 | 5.2 |
| 78 | 833.6 | 80.9 | 48 | 45.5 | 66.9 | 49.5 | 119.7 |
| 143 | 2842.2 | 1778.2 | 290 | 291.2 | 190.4 | 65.6 | 203.5 |
| 174 | 3307.3 | 329.8 | 29.8 | 42.8 | 25.8 | 11.5 | 13.9 |
| 175 | 3878.9 | 1966.8 | 165.7 | 282.2 | 158.3 | 67.2 | 249.2 |
| 191 | 3952.2 | 5278 | 46.8 | 181.4 | 148.2 | 97.3 | 152.1 |
| 212 | 2201.7 | 1134.3 | 70.4 | 55.7 | 3.5 | 87 | 99.8 |
| 222 | 469 | 451.7 | 120.4 | 148.4 | 57.7 | 49.6 | 58 |
| 233 | 11069.2 | 5607 | 13 | 9.8 | 76.9 | 7.6 | 5.6 |
| 234 | 3590 | 3449.5 | 186 | 201.3 | 165.3 | 54.8 | 141.1 |
| 237 | 2057.6 | 740.2 | 135.3 | 150.7 | 16.6 | 14.5 | 19 |
| 238 | 1679.4 | 432.3 | 22.5 | 43.8 | 11.4 | 6.2 | 5.1 |
| 245 | 2301.6 | 1040.5 | 7.1 | 12.7 | 22.5 | 5.9 | 4.6 |
| 250 | 434.6 | 1079.4 | 97.8 | 138.9 | 33.7 | 71.3 | 46.8 |
| 252 | 844.6 | 1446.1 | 35.6 | 80.3 | 29.6 | 63.3 | 88.5 |
| 264 | 1125.7 | 1084.5 | 102.8 | 31.6 | 147.6 | 101.5 | 163.3 |
| 290 | 347.9 | 466.9 | 35.8 | 7.3 | 14.4 | 87.2 | 71.7 |
| 294 | 1601.7 | 575.2 | 105.1 | 94.5 | 41.5 | 31.9 | 35.3 |
| 296 | 872.8 | 1349.1 | 217.8 | 162.6 | 186.2 | 171.2 | 212.5 |
| 342 | 948.7 | 482.8 | 296.5 | 220.2 | 308.1 | 126.3 | 298.6 |

13a18

| | Signal | | | | | | |
|---|---|---|---|---|---|---|---|
| SEQ ID | pb6′ | pb7′ | pb8′ | pd10 | pd11 | pd12 | pd9 |
| 2 | 167.6 | 233.9 | 232.6 | 116.9 | 204.5 | 293.2 | 79.6 |
| 3 | 110.3 | 88 | 221 | 90.7 | 74.9 | 90.9 | 129.5 |
| 5 | 29.7 | 70.2 | 182.5 | 32.6 | 34.5 | 130.5 | 12.9 |
| 6 | 226.5 | 440.1 | 207 | 219.7 | 275.2 | 134.1 | 193.1 |
| 9 | 28.9 | 26.8 | 30.9 | 32.4 | 5.3 | 25.7 | 20.3 |
| 12 | 6.6 | 18.8 | 61.4 | 38.2 | 10.7 | 4.1 | 11.6 |
| 18 | 53.6 | 37.8 | 31.8 | 68.8 | 117.5 | 70.8 | 23.4 |
| 22 | 16.9 | 10.6 | 32.1 | 6.4 | 29.2 | 21.2 | 3.1 |
| 25 | 127 | 123.7 | 118.7 | 9.7 | 10.6 | 64.9 | 6.6 |
| 28 | 13.2 | 4.9 | 43.3 | 8 | 8.1 | 12 | 26.6 |
| 32 | 36.4 | 51.5 | 25.1 | 17.2 | 17.2 | 19.7 | 11 |
| 39 | 326.5 | 182.6 | 27.3 | 126.2 | 151.9 | 26 | 182.7 |
| 74 | 48.2 | 29 | 39.8 | 55.3 | 35.3 | 76.9 | 6.2 |
| 78 | 92.1 | 20 | 93.1 | 26.9 | 11.9 | 56.6 | 104.8 |
| 143 | 176.4 | 224.5 | 248.5 | 126.2 | 184.6 | 162.8 | 249.6 |
| 174 | 40.8 | 149.8 | 24.2 | 10.6 | 15.6 | 81.4 | 16.8 |
| 175 | 262.5 | 355.4 | 207.8 | 21.6 | 213.9 | 175.8 | 193.7 |
| 191 | 151.2 | 310.7 | 93.3 | 65.7 | 108.4 | 95.9 | 79.3 |
| 212 | 93.6 | 121.7 | 141.7 | 30.8 | 42.6 | 108.4 | 93.2 |
| 222 | 83.5 | 82.8 | 60.7 | 16.4 | 50 | 71.1 | 66.9 |
| 233 | 144.7 | 64.1 | 16.5 | 7 | 6.4 | 70.8 | 8.1 |
| 234 | 40.4 | 248.1 | 43.8 | 45.5 | 143.3 | 30.9 | 77.2 |
| 237 | 223.8 | 141.1 | 129.5 | 57.6 | 21.9 | 11.5 | 18.7 |
| 238 | 32.1 | 27.6 | 66.5 | 10.5 | 33.4 | 7.7 | 61.6 |
| 245 | 19.8 | 7.2 | 4.8 | 2.4 | 11.2 | 4.7 | 6.7 |
| 250 | 75.3 | 109.2 | 65.3 | 85.7 | 119.9 | 118.7 | 66.4 |
| 252 | 103.8 | 91.2 | 94.8 | 17 | 69.3 | 76.1 | 22.5 |
| 264 | 151 | 224.6 | 129.9 | 122.8 | 99.8 | 61.5 | 24.8 |
| 290 | 21.8 | 27.6 | 50.7 | 49.3 | 6.2 | 2.7 | 3 |
| 294 | 91.1 | 58.4 | 40 | 24.8 | 52.6 | 67.8 | 31.7 |
| 296 | 282.4 | 299.2 | 143.7 | 149.7 | 197.9 | 205.2 | 147.7 |
| 342 | 304.5 | 437.8 | 327.4 | 90.9 | 247.6 | 224.4 | 268.6 |

[0099] TABLE 13b
13b1

| | |
|---|---|
| SEQ | ThyMixBen_02014_. . ._Signal |

| ID | 40062_H133A_800TT | 40063_H133A_801TT | 40064_H133A_802TT | 40065_H133A_804TT |
|---|---|---|---|---|
| 83 | 156.7 | 114.3 | 73.8 | 240.3 |
| 142 | 28.3 | 7.9 | 15 | 28.4 |
| 136 | 100.4 | 23.4 | 15.3 | 106.9 |
| 137 | 527.2 | 47 | 32.3 | 177.2 |
| 152 | 237.5 | 230.4 | 188.7 | 465.2 |
| 160 | 291.6 | 141.9 | 80.9 | 323.1 |
| 163 | 15.6 | 53.1 | 25.1 | 70.8 |
| 165 | 190.2 | 230.7 | 142.4 | 483.5 |
| 210 | 436.9 | 8.6 | 18.4 | 343.7 |
| 214 | 269.2 | 134.4 | 167.7 | 141.8 |
| 219 | 217 | 19.6 | 7.9 | 85.6 |
| 224 | 588.2 | 121.4 | 119.2 | 275.2 |
| 225 | 508.1 | 30.1 | 42.3 | 107.3 |
| 226 | 57.3 | 48.2 | 80.9 | 103.9 |
| 309 | 257.7 | 20.6 | 20.7 | 75.5 |
| 332 | 287.1 | 17 | 26.1 | 103.8 |
| 346 | 622.2 | 18.3 | 24 | 17.6 |

| SEQ | ThyMixBen_02014_. . ._Signal | | |
|---|---|---|---|
| ID | 40066_H133A_805TT | 40067_H133A_806TT | 40068_H133A_807TT |
| 83 | 173 | 193.6 | 291.2 |
| 142 | 26.9 | 25.8 | 14.2 |
| 136 | 28.3 | 14.9 | 56 |
| 137 | 19.5 | 53.1 | 404.6 |
| 152 | 183 | 260.9 | 190.9 |
| 160 | 98.1 | 120.3 | 219.7 |
| 163 | 20.1 | 56.1 | 47.8 |
| 165 | 179.3 | 241.7 | 410.9 |
| 210 | 31.8 | 8 | 148.1 |
| 214 | 145.7 | 140.5 | 349.1 |
| 219 | 21.8 | 26.7 | 115.1 |
| 224 | 136.6 | 240.5 | 392.5 |
| 225 | 59.4 | 29.5 | 147.3 |
| 226 | 43.5 | 12.3 | 88.9 |
| 309 | 19.2 | 24 | 833.9 |
| 332 | 115.9 | 68.8 | 37.9 |
| 346 | 20.7 | 13.2 | 442.1 |

13b2

| | |
|---|---|
| SEQ | 02014_. . ._Signal |

| ID | 40198_H133A_871TT | 40321_H133A_913TT | 40322_H133A_914TT | 40323_H133A_915TT |
|---|---|---|---|---|
| 83 | 39.5 | 90.2 | 76.4 | 255.8 |
| 142 | 25.3 | 22.5 | 12.9 | 34.4 |
| 136 | 9.8 | 31.8 | 16.8 | 132 |
| 137 | 227.8 | 53.6 | 68.7 | 60.1 |
| 152 | 184.4 | 214.3 | 253.2 | 294.7 |
| 160 | 267.5 | 250.7 | 206.5 | 328.8 |
| 163 | 44.3 | 56.4 | 23.9 | 98.5 |
| 165 | 174.3 | 221.8 | 185.5 | 266.3 |
| 210 | 25.8 | 153.6 | 42 | 55.5 |
| 214 | 43.2 | 83.6 | 110.6 | 213.7 |
| 219 | 56.6 | 53.5 | 45.2 | 122.1 |
| 224 | 269.7 | 357.4 | 260 | 191.5 |
| 225 | 204.8 | 322.6 | 114.2 | 55.6 |
| 226 | 11.9 | 57.4 | 69.9 | 22 |
| 309 | 37.9 | 37 | 28.2 | 53 |
| 332 | 9.9 | 59.2 | 66.7 | 57.8 |
| 346 | 28.6 | 263.8 | 11.1 | 27.2 |

| SEQ | 02014_. . ._Signal | | |
|---|---|---|---|
| ID | 40324_H133A_917TT | 40325_H133A_918TT | 40326_H133A_919TT |
| 83 | 150.8 | 109.7 | 142.6 |
| 142 | 8.5 | 20.6 | 67.7 |
| 136 | 115.4 | 130 | 7.2 |
| 137 | 29.6 | 133.2 | 29 |
| 152 | 313.8 | 251.3 | 294.2 |
| 160 | 191.1 | 220.8 | 114.4 |
| 163 | 35.2 | 68 | 41.8 |
| 165 | 104.6 | 217.1 | 159.9 |
| 210 | 8.2 | 152 | 49.1 |
| 214 | 132.6 | 89.3 | 138.7 |
| 219 | 24.4 | 124 | 41.3 |
| 224 | 168.8 | 330.8 | 169.8 |
| 225 | 121.8 | 317.6 | 95.8 |
| 226 | 67.5 | 33.6 | 19.3 |
| 309 | 10.2 | 32.6 | 24.2 |
| 332 | 13 | 40.5 | 9 |
| 346 | 32.5 | 153.4 | 61.1 |

13b3

| SEQ | ThyFolBen_02014_. . ._Signal | | | | |
|---|---|---|---|---|---|
| ID | 40079_H133A_818TT | 40080_H133A_819TT | 40081_H133A_820TT | 40082_H133A_821TT | 40083_H133A_822TT |
| 83 | 63.4 | 151.8 | 104.1 | 27.5 | 138.9 |
| 142 | 15 | 20.2 | 18.8 | 18.4 | 23 |
| 136 | 17.6 | 135.4 | 77.1 | 31.7 | 17.7 |
| 137 | 24.7 | 36.1 | 18 | 28.4 | 42.6 |
| 152 | 62.1 | 176.7 | 146.4 | 273.3 | 328.2 |
| 160 | 153 | 138.1 | 131 | 192.4 | 124.1 |
| 163 | 6.9 | 21.4 | 35 | 63.5 | 13.4 |
| 165 | 28.7 | 155.3 | 112.6 | 135.2 | 222.6 |
| 210 | 27.5 | 10.4 | 8.1 | 9.9 | 32.7 |
| 214 | 211.7 | 210.8 | 83.9 | 166.4 | 160.2 |
| 219 | 18.7 | 111.8 | 45.7 | 10.9 | 29.6 |
| 224 | 114.7 | 241.8 | 100 | 160.9 | 242.4 |
| 225 | 69.4 | 63.8 | 145.4 | 110.9 | 126.1 |
| 226 | 92.1 | 95.5 | 36.3 | 74.5 | 67.2 |
| 309 | 16.8 | 17.1 | 12.1 | 18.8 | 27.3 |
| 332 | 40 | 20.5 | 21 | 11 | 6.6 |
| 346 | 7.2 | 27.1 | 18.6 | 29.3 | 26.7 |

13b4

| SEQ | fa_EA40 . . ._Signal | | | | |
|---|---|---|---|---|---|
| ID | 191_VDX862TT | 192_VDX863TT | 193_VDX864TT | 194_VDX865TT | 195_VDX866TT |
| 83 | 26.9 | 24.4 | 56.7 | 155.1 | 22.3 |
| 142 | 16.1 | 22.4 | 14.5 | 54.8 | 17.1 |
| 136 | 23 | 59 | 20.4 | 121.4 | 12.5 |
| 137 | 26.7 | 32.4 | 19.4 | 45.2 | 32.8 |
| 152 | 75.7 | 189.4 | 211.4 | 320.4 | 194 |
| 160 | 239.5 | 101.4 | 91.3 | 292.1 | 55.8 |
| 163 | 48.5 | 47.6 | 23.1 | 168.3 | 35.4 |
| 165 | 26.5 | 94.3 | 81.1 | 197.9 | 112.9 |
| 210 | 32.2 | 16.2 | 23.8 | 81.4 | 25.3 |
| 214 | 119.9 | 130.9 | 141.7 | 235.4 | 263.7 |
| 219 | 80.6 | 7.6 | 15.9 | 20.9 | 25 |
| 224 | 50.9 | 25.8 | 50 | 80 | 32.6 |
| 225 | 66.7 | 41.4 | 64.4 | 69.5 | 18.1 |
| 226 | 76 | 2.8 | 3.5 | 99.1 | 88.6 |
| 309 | 6.7 | 15.2 | 9.4 | 62.6 | 20.2 |
| 332 | 9.6 | 36.9 | 10.8 | 91.1 | 103 |
| 346 | 25.1 | 16.5 | 20.8 | 89.5 | 34.2 |

| | |
|---|---|
| SEQ | fa_EA40 . . ._Signal |

| ID | 196_VDX867TT | 197_VDX869TT | 219_VDX907TT | 220_VDX908TT |
|---|---|---|---|---|
| 83 | 94.8 | 63 | 41.9 | 256 |
| 142 | 15.8 | 15 | 21.9 | 23.9 |
| 136 | 88.4 | 77.1 | 47.1 | 36.8 |
| 137 | 30.8 | 55.2 | 97 | 63.4 |
| 152 | 75.5 | 314 | 114.8 | 260 |
| 160 | 86.8 | 53.7 | 47.4 | 145.4 |
| 163 | 13.4 | 51.5 | 13.5 | 60.4 |
| 165 | 164.6 | 155.9 | 29.7 | 250.4 |
| 210 | 22.7 | 140.5 | 15.5 | 200.8 |
| 214 | 30.4 | 124.9 | 57 | 241 |
| 219 | 10 | 16.5 | 23.4 | 20.1 |
| 224 | 99.7 | 136.4 | 137.5 | 167 |
| 225 | 94.7 | 51.1 | 51.6 | 149.8 |
| 226 | 18.3 | 60.6 | 6.4 | 11.6 |
| 309 | 18.4 | 15.9 | 10.2 | 33.3 |
| 332 | 30.1 | 12.3 | 19.7 | 36.5 |
| 346 | 20.9 | 18.3 | 11.3 | 114.6 |

13b5

| | |
|---|---|
| SEQ | 02014_. . ._Signal |

| ID | 40327_H133A_920TT | 40332_H133A_938TT | 40334_H133A_941TT | 40335_H133A_940TT |
|---|---|---|---|---|
| 83 | 216.8 | 145.1 | 58.1 | 102.1 |
| 142 | 22.2 | 7.9 | 6.6 | 14.5 |
| 136 | 71.7 | 30.1 | 47.9 | 57.1 |
| 137 | 47 | 48.1 | 69.1 | 57.4 |
| 152 | 252.7 | 189 | 184.9 | 138.7 |
| 160 | 153.6 | 179.9 | 121.9 | 66.6 |
| 163 | 53.3 | 13 | 69.1 | 38.6 |
| 165 | 146.9 | 146.7 | 85.1 | 120 |
| 210 | 24 | 59.1 | 21.5 | 23.8 |
| 214 | 90.5 | 224.7 | 178.7 | 139.3 |
| 219 | 36.4 | 17.5 | 14.9 | 63.3 |
| 224 | 180.2 | 126.6 | 154.2 | 161 |
| 225 | 59.7 | 197.5 | 83.8 | 115.7 |
| 226 | 31.9 | 58.1 | 33.7 | 34.5 |
| 309 | 27.1 | 7.7 | 6.2 | 15.6 |
| 332 | 83.8 | 7.3 | 40.7 | 47.6 |
| 346 | 17 | 18.8 | 27.6 | 24.4 |

13b6

| SEQ | EA02014_. . ._Signal | | |
|---|---|---|---|
| ID | 40374_H133A_921TT | 40376_H133A_923TT | 40377_H133A_924TT |
| 83 | 174.4 | 32.7 | 69.1 |
| 142 | 13.7 | 19.8 | 16.5 |
| 136 | 24.2 | 9.3 | 12.1 |
| 137 | 38.3 | 143.4 | 28.2 |
| 152 | 178.2 | 230.8 | 155 |
| 160 | 125.2 | 133.5 | 74.9 |
| 163 | 54.4 | 4.9 | 35.5 |
| 165 | 218.9 | 155.1 | 206 |
| 210 | 36.8 | 25 | 20.6 |
| 214 | 126.7 | 186.1 | 167.2 |
| 219 | 32.3 | 25.5 | 15.3 |
| 224 | 220.8 | 301.9 | 129.7 |
| 225 | 158 | 221.8 | 127.9 |
| 226 | 37.5 | 33.4 | 9.6 |
| 309 | 26.1 | 16 | 17.8 |
| 332 | 26.3 | 38.5 | 6.7 |
| 346 | 20.7 | 151.4 | 21.6 |
| SEQ | EA02014_. . ._Signal | | |
| ID | 40378_H133A_925TT | 40379_H133A_926TT | 40380_H133A_927TT |
| 83 | 86.6 | 67.7 | 204.9 |
| 142 | 57.7 | 22.9 | 18.9 |
| 136 | 25.3 | 190.4 | 16.3 |
| 137 | 77.5 | 156.1 | 255.2 |
| 152 | 237.4 | 235.7 | 70 |
| 160 | 197 | 170.1 | 234 |
| 163 | 46.1 | 65.2 | 59.9 |
| 165 | 85.6 | 158.1 | 532.5 |
| 210 | 25.8 | 19.8 | 551.3 |
| 214 | 114.1 | 191.9 | 161.4 |
| 219 | 10.2 | 95.6 | 18.5 |
| 224 | 178.8 | 308.2 | 270.9 |
| 225 | 65.6 | 269.4 | 60.6 |
| 226 | 57.2 | 80.8 | 18.1 |
| 309 | 31.8 | 32.6 | 49.2 |
| 332 | 11.6 | 73.5 | 21.6 |
| 346 | 19.2 | 179.4 | 53.6 |

13b7

| SEQ | EA02014_. . ._Signal | | | |
|---|---|---|---|---|
| ID | 40387_H133A_955TT | 40388_H133A_956TT | 40389_H133A_957TT | 40390_H133A_959TT |
| 83 | 29.1 | 121.5 | 70.7 | 28.8 |
| 142 | 16.7 | 14.2 | 10.8 | 21.4 |
| 136 | 15.7 | 27.8 | 67.7 | 45.9 |
| 137 | 28.5 | 44.8 | 34.5 | 50 |
| 152 | 85.4 | 163 | 183.4 | 127.1 |
| 160 | 121.9 | 51.9 | 175 | 137.4 |
| 163 | 47 | 27.7 | 43.6 | 80.1 |
| 165 | 42.2 | 122.9 | 103.8 | 150.6 |
| 210 | 27.1 | 5.2 | 20.4 | 73.7 |
| 214 | 36.4 | 68.3 | 165.9 | 25.3 |
| 219 | 23.3 | 51 | 29.1 | 25.7 |
| 224 | 143.8 | 95.1 | 128.8 | 78.7 |
| 225 | 140.5 | 83.1 | 34.3 | 54 |
| 226 | 4.3 | 24.7 | 84.1 | 47.7 |
| 309 | 18.7 | 11.4 | 26.7 | 44.2 |
| 332 | 11.1 | 4 | 37.9 | 14.1 |
| 346 | 21.8 | 22.1 | 12.8 | 35.7 |

| SEQ | EA02014_. . ._Signal | | |
|---|---|---|---|
| ID | 40391_H133A_960TT | 40392_H133A_961TT | 40393_H133A_962TT |
| 83 | 121.6 | 120.5 | 34 |
| 142 | 18.6 | 16.5 | 21.9 |
| 136 | 15.4 | 8.2 | 43 |
| 137 | 31.3 | 162.2 | 18.5 |
| 152 | 298.3 | 193 | 221.2 |
| 160 | 208.5 | 125.9 | 162.9 |
| 163 | 29.7 | 33.8 | 44.4 |
| 165 | 253.3 | 106.9 | 221.6 |
| 210 | 29.4 | 38.7 | 85 |
| 214 | 129.8 | 165.9 | 100.9 |
| 219 | 67 | 20.8 | 21 |
| 224 | 108.8 | 152 | 109 |
| 225 | 62.8 | 114.7 | 94.3 |
| 226 | 33.3 | 66.1 | 13.3 |
| 309 | 20.6 | 34.1 | 35.2 |
| 332 | 17.8 | 13.1 | 11.5 |
| 346 | 38.7 | 29.6 | 10.1 |

13b8

| SEQ | ThyPapCan_02014_. . ._Signal | | | | |
|---|---|---|---|---|---|
| ID | 40090_H133A_829TT | 40091_H133A_830TT@IC | 40092_H133A_831TT | 40093_H133A_832TT | 40095_H133A_834TT |
| 83 | 304.3 | 199.4 | 258.5 | 171.4 | 112.3 |
| 142 | 26 | 34.7 | 22.4 | 19.1 | 16.4 |
| 136 | 122.2 | 116.6 | 21.7 | 27.3 | 30.7 |
| 137 | 40.7 | 72 | 23.8 | 36.8 | 19.5 |
| 152 | 611.5 | 682.6 | 236.2 | 170.5 | 200.6 |
| 160 | 218.1 | 244.7 | 225.4 | 68.9 | 76.4 |
| 163 | 17.8 | 119.7 | 38.9 | 51.8 | 52.9 |
| 165 | 370.6 | 263.3 | 353.8 | 154.1 | 165.1 |
| 210 | 223.2 | 249.8 | 303 | 9.7 | 30.2 |
| 214 | 178.4 | 246.7 | 155.4 | 188.3 | 138.6 |
| 219 | 36.8 | 136.4 | 64.9 | 24.3 | 19.1 |
| 224 | 364.7 | 427.6 | 180 | 191.1 | 163.6 |
| 225 | 333.9 | 213.5 | 221 | 124.6 | 137.2 |
| 226 | 179.2 | 142 | 57 | 15.4 | 13.7 |
| 309 | 88.8 | 136.6 | 48.8 | 22.1 | 23.6 |
| 332 | 92 | 56.9 | 42.4 | 61.1 | 34.4 |
| 346 | 58.4 | 61 | 197.1 | 38 | 29.1 |

| | |
|---|---|
| SEQ | ThyPapCan_02014_. . ._Signal |

| ID | 40096_H133A_835TT | 40097_H133A_836TT | 40098_H133A_837TT@I2 | 40099_H133A_838TT@I2 |
|---|---|---|---|---|
| 83 | 186.5 | 28.5 | 137.1 | 85.9 |
| 142 | 25.8 | 12.1 | 22.5 | 15.4 |
| 136 | 110.2 | 143.8 | 14.1 | 140.7 |
| 137 | 31.5 | 29.6 | 29.4 | 32.5 |
| 152 | 104 | 136.4 | 118 | 155.9 |
| 160 | 137.3 | 83.2 | 171.7 | 66.7 |
| 163 | 42.7 | 25.5 | 57.2 | 23.6 |
| 165 | 233.2 | 100.4 | 227.9 | 213.3 |
| 210 | 94.5 | 21.9 | 42.1 | 23.1 |
| 214 | 133.7 | 69 | 298.6 | 90.8 |
| 219 | 25.9 | 11.7 | 13.6 | 23.8 |
| 224 | 211.5 | 36.2 | 303.4 | 164.5 |
| 225 | 195.1 | 46.9 | 145.6 | 34.3 |
| 226 | 91.8 | 33.5 | 132.6 | 38 |
| 309 | 40.5 | 16.5 | 33.9 | 24.7 |
| 332 | 70.6 | 14.5 | 108.1 | 60.8 |
| 346 | 281.5 | 37.5 | 30.8 | 33 |

13b9

| SEQ | Signal | | |
|---|---|---|---|
| ID | 02014_40317_H133A_839TT | pc_EA40200_VDX879TT | pc_EA40201_VDX881TT |
| 83 | 288.1 | 25.7 | 32.9 |
| 142 | 16.1 | 21.2 | 23.5 |
| 136 | 62.8 | 160.5 | 141.2 |
| 137 | 45.4 | 155.5 | 35.5 |
| 152 | 383.4 | 197 | 90.6 |
| 160 | 142.9 | 79.7 | 181.6 |
| 163 | 60.7 | 102.6 | 138.6 |
| 165 | 238.4 | 123.6 | 227.1 |
| 210 | 134.1 | 184.4 | 28.4 |
| 214 | 189.2 | 173 | 50 |
| 219 | 26.8 | 30.4 | 13.3 |
| 224 | 215.8 | 139.5 | 255.3 |
| 225 | 167.5 | 35.2 | 98.1 |
| 226 | 49.4 | 43.4 | 84.3 |
| 309 | 340.8 | 33.7 | 32 |
| 332 | 15.9 | 39.9 | 67.1 |
| 346 | 14.3 | 37.9 | 36.5 |
| SEQ | Signal | | |
| ID | pc_EA40202_VDX882TT | pc_EA40203_VDX883TT | pc_EA40204_VDX884TT |
| 83 | 29.2 | 58.6 | 184.4 |
| 142 | 7.6 | 21.5 | 30.6 |
| 136 | 8.7 | 13.2 | 19.4 |
| 137 | 63.9 | 41.5 | 31.1 |
| 152 | 123.7 | 188 | 240 |
| 160 | 205.4 | 157.5 | 137.8 |
| 163 | 54.2 | 51.3 | 9.1 |
| 165 | 113.8 | 224.6 | 241.9 |
| 210 | 42.7 | 12.1 | 10 |
| 214 | 164.7 | 109.2 | 250.7 |
| 219 | 78.6 | 34.3 | 34.8 |
| 224 | 96.9 | 181.3 | 163.2 |
| 225 | 32.4 | 221.4 | 54.3 |
| 226 | 16.4 | 141.3 | 27.2 |
| 309 | 22.8 | 29.8 | 45.9 |
| 332 | 14.3 | 88.5 | 25.2 |
| 346 | 33.5 | 28.7 | 37.4 |

13b10

| | |
|---|---|
| SEQ | pc_EA40 . . . Signal |

| ID | 205_VDX885TT | 206_VDX886TT | 207_VDX890TT | 208_VDX892TT | 209_VDX893TT | 210_VDX894TT |
|---|---|---|---|---|---|---|
| 83 | 22.9 | 81.5 | 34.1 | 159.2 | 88.7 | 43.6 |
| 142 | 26.4 | 22.6 | 8.7 | 10.8 | 18.5 | 23.6 |
| 136 | 28.1 | 18.2 | 9.6 | 14.6 | 17.3 | 22.5 |
| 137 | 207.7 | 94.4 | 68.8 | 83.7 | 17.8 | 140.4 |
| 152 | 77.3 | 225.5 | 227.5 | 95.5 | 301.1 | 59.9 |
| 160 | 294.5 | 164.6 | 110.3 | 84.5 | 105.6 | 163 |
| 163 | 140.9 | 34 | 25.9 | 9.3 | 41.9 | 83.5 |
| 165 | 241.8 | 101.4 | 193.6 | 161.9 | 112.8 | 190.6 |
| 210 | 416.8 | 24.1 | 45.5 | 15.1 | 26.9 | 15.6 |
| 214 | 323.3 | 139.5 | 148.2 | 174.1 | 104.5 | 142.1 |
| 219 | 131.8 | 12 | 25.9 | 48.9 | 14.4 | 96.2 |
| 224 | 215.3 | 136.2 | 126 | 193.8 | 195.4 | 67.1 |
| 225 | 49.5 | 105 | 54.2 | 97.4 | 33 | 38.8 |
| 226 | 181.1 | 55.2 | 34.1 | 4 | 15 | 125.1 |
| 309 | 89.7 | 47.4 | 58.6 | 17.8 | 23.5 | 72.3 |
| 332 | 73 | 66.8 | 48.2 | 27.5 | 41.1 | 25.3 |
| 346 | 13.6 | 107.7 | 145.3 | 12.7 | 18.3 | 20 |

13b11

| SEQ | 02014_40 . . ._Signal | | | | |
|---|---|---|---|---|---|
| ID | 319_H133A_903TT | 320_H133A_904TT | 328_H133A_928TT | 330_H133A_932TT | 331_H133A_933TT |
| 83 | 58.3 | 226.6 | 92.7 | 79.2 | 106.8 |
| 142 | 14.5 | 118.3 | 7.4 | 8 | 13 |
| 136 | 18.9 | 87 | 29.4 | 86.9 | 9.3 |
| 137 | 24.4 | 174.5 | 25.7 | 135.9 | 31.8 |
| 152 | 178.1 | 137.4 | 176.6 | 151.1 | 166.2 |
| 160 | 83.2 | 205 | 93.5 | 103.6 | 73.3 |
| 163 | 31.5 | 100.2 | 19.2 | 40.5 | 33.4 |
| 165 | 223.6 | 235.9 | 161.5 | 132.8 | 132 |
| 210 | 35.5 | 99.9 | 16.4 | 124.9 | 17 |
| 214 | 118.8 | 178 | 25.6 | 115.6 | 117 |
| 219 | 15.1 | 80.2 | 27.7 | 54.2 | 38.2 |
| 224 | 174.5 | 323.7 | 223.3 | 203 | 185.3 |
| 225 | 170.3 | 200.3 | 180.3 | 157.3 | 157.2 |
| 226 | 65.2 | 26.9 | 25.2 | 4.6 | 35.7 |
| 309 | 11.1 | 270.7 | 15.9 | 91.5 | 18.6 |
| 332 | 12 | 77.4 | 15.1 | 7.2 | 7.3 |
| 346 | 30.4 | 387.2 | 25.4 | 204.4 | 14.7 |

13b12

| SEQ | EA02014_403 . . ._Signal | | | | |
|---|---|---|---|---|---|
| ID | 75_H133A_922TT | 381_H133A_945TT | 382_H133A_946TT | 383_H133A_947TT | 384_H133A_948TT |
| 83 | 88.1 | 22.1 | 193.5 | 166.9 | 73.7 |
| 142 | 12 | 19.6 | 13.2 | 21.6 | 16.9 |
| 136 | 11.8 | 12.3 | 52 | 46.7 | 107.9 |
| 137 | 51.3 | 182.2 | 43.4 | 23.9 | 14.5 |
| 152 | 341 | 139 | 248.1 | 299.5 | 84.2 |
| 160 | 95.6 | 102 | 99.5 | 184.6 | 90.4 |
| 163 | 77.6 | 41.6 | 25.9 | 51.7 | 4.9 |
| 165 | 254.8 | 63.5 | 172.6 | 209.2 | 81.1 |
| 210 | 8.8 | 78.8 | 28.8 | 44 | 92.5 |
| 214 | 79 | 94.5 | 148.7 | 101.7 | 82.7 |
| 219 | 22.7 | 31.8 | 63.9 | 23.8 | 18.1 |
| 224 | 190.5 | 194.7 | 212 | 278.9 | 201.1 |
| 225 | 48.8 | 135.5 | 46.8 | 274.4 | 97.5 |
| 226 | 20 | 24 | 90.8 | 45.3 | 8.8 |
| 309 | 30.5 | 195 | 29.7 | 53.4 | 37.9 |
| 332 | 10.4 | 4.2 | 9.2 | 75 | 44 |
| 346 | 19.1 | 298.1 | 35.4 | 251.2 | 37.2 |

13b13

| SEQ | ThyFolCan_02014_400 . . ._Signal | | | | |
|---|---|---|---|---|---|
| ID | 84_H133A_823TT | 85_H133A_824TT | 86_H133A_825TT | 88_H133A_827TT | 89_H133A_828TT |
| 83 | 242 | 70.1 | 71.2 | 24.8 | 145.4 |
| 142 | 19.8 | 12.5 | 35.7 | 17.7 | 19.6 |
| 136 | 35.7 | 21 | 59.4 | 20.3 | 9 |
| 137 | 86.1 | 23.7 | 116.3 | 18.2 | 48.6 |
| 152 | 271.9 | 199.6 | 213.1 | 140.9 | 202.5 |
| 160 | 134.5 | 134.1 | 415.1 | 162.4 | 154 |
| 163 | 64.5 | 46.1 | 82.1 | 15.5 | 57.8 |
| 165 | 189.3 | 222.6 | 239 | 223.8 | 145.3 |
| 210 | 8.8 | 236.3 | 50 | 21.8 | 33.8 |
| 214 | 33.1 | 71.3 | 121.6 | 157.3 | 100.8 |
| 219 | 24.8 | 64.8 | 82.1 | 14.1 | 60.2 |
| 224 | 213 | 96.4 | 371.4 | 159.1 | 92.8 |
| 225 | 164.9 | 103.3 | 224.4 | 145.2 | 98.3 |
| 226 | 10.3 | 5 | 24 | 30.5 | 21.6 |
| 309 | 15 | 33.3 | 38.4 | 14.9 | 19.5 |
| 332 | 77.6 | 55.7 | 124.1 | 10.6 | 84.5 |
| 346 | 39 | 124.6 | 31.5 | 29.5 | 21.3 |

13b14

| | |
|---|---|
| SEQ | Signal |

| ID | 02014_40318_H133A_840TT | fc_EA40212_VDX896TT | fc_EA40214_VDX898TT | fc_EA40215_VDX899TT |
|---|---|---|---|---|
| 83 | 189.9 | 110.7 | 51.4 | 35.8 |
| 142 | 18.9 | 20.5 | 246.2 | 18.5 |
| 136 | 22.6 | 105.2 | 21.3 | 20.3 |
| 137 | 32.3 | 40.6 | 46.3 | 33.8 |
| 152 | 306 | 216.1 | 317.8 | 169.4 |
| 160 | 99.5 | 197.5 | 240.4 | 68.7 |
| 163 | 52.1 | 29.7 | 70.7 | 75.3 |
| 165 | 236.7 | 142.2 | 147 | 168 |
| 210 | 26.5 | 108.8 | 39.9 | 25.5 |
| 214 | 115.1 | 63.9 | 59 | 129.9 |
| 219 | 16.2 | 46.2 | 62.7 | 39.4 |
| 224 | 203.9 | 194.6 | 321.6 | 225.2 |
| 225 | 198 | 53.6 | 82.8 | 52.5 |
| 226 | 31 | 57.3 | 111.5 | 66.7 |
| 309 | 17.2 | 40.2 | 44.3 | 43 |
| 332 | 51.4 | 26.5 | 129.1 | 7.8 |
| 346 | 11 | 27.8 | 21.6 | 19.4 |

| SEQ | Signal | | |
|---|---|---|---|
| ID | fc_EA40216_VDX900TT | fc_EA40217_VDX901TT | fc_EA40218_VDX902TT |
| 83 | 104.6 | 22.8 | 44.7 |
| 142 | 20.7 | 25.8 | 28.6 |
| 136 | 33.6 | 24.5 | 24.4 |
| 137 | 23.9 | 90.6 | 48.5 |
| 152 | 154.6 | 169.3 | 374.5 |
| 160 | 146.7 | 210.5 | 196.7 |
| 163 | 13.6 | 25.1 | 59.3 |
| 165 | 174.2 | 28.5 | 89.4 |
| 210 | 42.2 | 11 | 24.4 |
| 214 | 150.1 | 194.1 | 218.2 |
| 219 | 42.1 | 92.3 | 39.4 |
| 224 | 238 | 212.5 | 187.3 |
| 225 | 250.7 | 72 | 53.5 |
| 226 | 24.8 | 41 | 79.9 |
| 309 | 20.2 | 21.3 | 63.8 |
| 332 | 5.6 | 37.8 | 31.6 |
| 346 | 320.2 | 24.3 | 210.6 |

13b15

| | |
|---|---|
| SEQ | Signal |

| ID | fc_EA40221_VDX909TT | fc_EA40222_VDX910TT | EA02014_40386_H133A_954TT | EA02014_40394_H133A_967TT |
|---|---|---|---|---|
| 83 | 312.2 | 30.6 | 105.2 | 42.2 |
| 142 | 17.8 | 9.9 | 41.7 | 30.5 |
| 136 | 63.1 | 87.5 | 38 | 29.7 |
| 137 | 170.4 | 111.7 | 78.6 | 32.1 |
| 152 | 624.7 | 121 | 215.4 | 212.7 |
| 160 | 257.9 | 30.5 | 247.6 | 161.6 |
| 163 | 21.6 | 27 | 43.5 | 50.7 |
| 165 | 251.9 | 105 | 92.7 | 136.3 |
| 210 | 34 | 37.1 | 49 | 43.9 |
| 214 | 257.9 | 176.9 | 168.4 | 69.9 |
| 219 | 117.7 | 25.9 | 43.2 | 42.1 |
| 224 | 55.1 | 150 | 176.9 | 280.1 |
| 225 | 205.8 | 42.3 | 66.7 | 320.3 |
| 226 | 84.9 | 14.8 | 148.6 | 26 |
| 309 | 745.6 | 9.7 | 53.6 | 42 |
| 332 | 15.9 | 7.6 | 69.9 | 10.3 |
| 346 | 48 | 25 | 54.7 | 142.6 |

| SEQ | Signal | | |
|---|---|---|---|
| ID | EA02014_40395_H133A_968TT | EA02014_40396_H133A_969TT | EA02014_40397_H133A_970TT |
| 83 | 47.9 | 24.4 | 46.5 |
| 142 | 11.8 | 16.7 | 25.7 |
| 136 | 206.6 | 10.1 | 99.2 |
| 137 | 20.5 | 29.4 | 18.2 |
| 152 | 160.9 | 216.7 | 214.3 |
| 160 | 192.1 | 87.9 | 538.8 |
| 163 | 56.9 | 72.4 | 48.7 |
| 165 | 166.5 | 123.8 | 180.7 |
| 210 | 21.1 | 7.4 | 167.3 |
| 214 | 113.6 | 140.1 | 14 |
| 219 | 24 | 12.6 | 57.9 |
| 224 | 184.5 | 194.4 | 374.4 |
| 225 | 27 | 66.2 | 54.6 |
| 226 | 47.6 | 36.9 | 21.7 |
| 309 | 23.5 | 14.6 | 71 |
| 332 | 63.6 | 13.3 | 26.8 |
| 346 | 73.6 | 16.6 | 79.7 |

13b16

| SEQ | Signal | | | | | | |
|---|---|---|---|---|---|---|---|
| ID | EA02014_40405_H133A_982TT | EA02014_40406_H133A_983TT | pb1 | pb2 | pb3 | pb4 | pb5′ |
| 83 | 58.1 | 37.8 | 524.7 | 768.1 | 855.6 | 1163.9 | 876.3 |
| 142 | 19.4 | 37.4 | 1289.3 | 1088.9 | 659.7 | 732.6 | 1415 |
| 136 | 94.2 | 11 | 1770.1 | 1622.7 | 523 | 979.3 | 617.3 |
| 137 | 17.6 | 111.2 | 1871 | 2554 | 1313.7 | 781.1 | 2087.1 |
| 152 | 255.8 | 37.6 | 9696.4 | 9404.8 | 1099.8 | 9900.7 | 7060 |
| 160 | 54.7 | 347.1 | 1273.2 | 1171.6 | 907 | 937.4 | 926.2 |
| 163 | 32.9 | 59.7 | 833 | 682.5 | 559.6 | 358.6 | 467.8 |
| 165 | 71.8 | 232.2 | 1217.8 | 986.3 | 1278.9 | 2537.1 | 1464.3 |
| 210 | 5.2 | 33.2 | 3401 | 2546.6 | 756.3 | 4893 | 1770.8 |
| 214 | 212.6 | 165 | 1384.3 | 1540 | 636.7 | 656.5 | 1213.9 |
| 219 | 14.1 | 43.6 | 1692.6 | 1911.7 | 912 | 2112.2 | 1417.9 |
| 224 | 137 | 228.2 | 2481.3 | 3104.2 | 1905.4 | 2292.4 | 2242.7 |
| 225 | 109.6 | 153.4 | 2367.8 | 2860.8 | 1887.6 | 2052.6 | 2116.6 |
| 226 | 41.6 | 11 | 797.2 | 969.9 | 617.1 | 626.6 | 920 |
| 309 | 20.7 | 30.6 | 5357.5 | 5904 | 3572.6 | 6641.9 | 3580.9 |
| 332 | 6.8 | 60.2 | 258.8 | 304.2 | 110.1 | 255.3 | 363.3 |
| 346 | 27 | 57.3 | 1584.2 | 1705.7 | 1507.5 | 1626.3 | 1587.1 |

13b17

| SEQ | Signal | | | | | | |
|---|---|---|---|---|---|---|---|
| ID | pb6′ | pb7′ | pb8′ | pd10 | pd11 | pd12 | pd9 |
| 83 | 818.3 | 333.4 | 692.1 | 709.8 | 699.7 | 926.2 | 534.7 |
| 142 | 1287.9 | 565.2 | 2004.2 | 821.9 | 904.8 | 1619.6 | 282.5 |
| 136 | 1039 | 962.2 | 1013.5 | 1147.9 | 840.9 | 599.8 | 284 |
| 137 | 1881.4 | 667.8 | 2058.1 | 2182.1 | 1678.9 | 1632.9 | 912.1 |
| 152 | 3657.7 | 2025 | 2993.5 | 11129.5 | 11824.2 | 11963.5 | 1607 |
| 160 | 1154.5 | 301.4 | 473.2 | 1849.5 | 1424.7 | 660 | 242 |
| 163 | 628.5 | 6534.3 | 1863.4 | 148.7 | 247.4 | 230.2 | 4365.5 |
| 165 | 1485.2 | 889 | 1904.7 | 1404.2 | 1560.4 | 1123.6 | 1919.6 |
| 210 | 2729.4 | 595.1 | 5286.8 | 7026.5 | 3861.8 | 1028.8 | 1724.8 |
| 214 | 871.1 | 442.3 | 644.5 | 936.1 | 939.1 | 852 | 347.7 |
| 219 | 1216.7 | 411.6 | 959.7 | 1085.9 | 1974.4 | 1580.2 | 245.9 |
| 224 | 2039.1 | 1488.3 | 1844.2 | 2280.1 | 2823.4 | 1252.3 | 1246.6 |
| 225 | 2214.8 | 1494.6 | 2186 | 1961.1 | 2628.3 | 1184.1 | 1230.7 |
| 226 | 822.2 | 437.3 | 684.5 | 540.5 | 839.5 | 1062.8 | 273.7 |
| 309 | 3787.2 | 1401.5 | 3537 | 3522.1 | 4518.1 | 5118.1 | 931.7 |
| 332 | 218.7 | 630.6 | 462.4 | 168.4 | 220.4 | 242.2 | 322.8 |
| 346 | 1682.4 | 909 | 2317.6 | 1193.5 | 1748.9 | 2159 | 622.7 |

[0100] TABLE 14
Control Genes

| | |
|---|---|
| SEQ ID NO: | Gene Name |

Control Genes for Blood

| | |
|---|---|
| 142 | Bone marrow stromal cell antigen 1 (BST1) |
| 219 | Leucocyte immunoglobulin-like receptor-6b (LIR-6) |
| 309 | Bridging integrator 2 (BIN2) |

Control Genes for Thyroid

| | |
|---|---|
| 9 | Cysteine-rich, angiogenic inducer, 61 (CYR61) |
| 12 | Selenoprotein P, plasma, 1 (SEPP1) |
| 18 | Insulin-like growth factor-binding protein 4 (IGFBP4) |

[0101] TABLE 15a

| SEQ ID | | | | | | | | |
|---|---|---|---|---|---|---|---|---|
| | BN_800TT | BN_801TT | BN_802TT | BN_804TT | BN_805TT | BN_806TT | BN_807TT | BN_871TT |
| 142 | 28.3 | 7.9 | 15 | 28.4 | 26.9 | 25.8 | 14.2 | 25.3 |
| 219 | 217 | 19.6 | 7.9 | 85.6 | 21.8 | 26.7 | 115.1 | 56.6 |
| 309 | 257.7 | 20.6 | 20.7 | 75.5 | 19.2 | 24 | 833.9 | 37.9 |
| | BN_913TT | BN_914TT | BN_915TT | FA_917TT | FA_918TT | FA_919TT | FA_818TT | FA_819TT |
| 142 | 22.5 | 12.9 | 34.4 | 8.5 | 20.6 | 67.7 | 15 | 20.2 |
| 219 | 53.5 | 45.2 | 122.1 | 24.4 | 124 | 41.3 | 18.7 | 111.8 |
| 309 | 37 | 28.2 | 53 | 10.2 | 32.6 | 24.2 | 16.8 | 17.1 |
| | FA_820TT | FA_821TT | FA_822TT | FA_842TT | FA_862TT | FA_863TT | FA_864TT | FA_865TT |
| 142 | 18.8 | 18.4 | 23 | 10 | 16.1 | 22.4 | 14.5 | 54.8 |
| 219 | 45.7 | 10.9 | 29.6 | 28.9 | 80.6 | 7.6 | 15.9 | 20.9 |
| 309 | 12.1 | 18.8 | 27.3 | 15.2 | 6.7 | 15.2 | 9.4 | 62.6 |
| | FA_866TT | FA_867TT | FA_869TT | FA_907TT | FA_908TT | FA_920TT | FA_938TT | FA_940TT |
| 142 | 17.1 | 15.8 | 15 | 21.9 | 23.9 | 22.2 | 7.9 | 6.6 |
| 219 | 25 | 10 | 16.5 | 23.4 | 20.1 | 36.4 | 17.5 | 14.9 |
| 309 | 20.2 | 18.4 | 15.9 | 10.2 | 33.3 | 27.1 | 7.7 | 6.2 |

| | FA_941TT | Fa_EA40374_921TT | Fa_EA40376_923TT | BN_EA40377_924TT | Fa_EA40378_925TT |
|---|---|---|---|---|---|
| 142 | 14.5 | 13.7 | 19.8 | 16.5 | 57.7 |
| 219 | 63.3 | 32.3 | 25.5 | 15.3 | 10.2 |
| 309 | 15.6 | 26.1 | 16 | 17.8 | 31.8 |

| | Fa_EA40379_926TT | BN_EA40380_927TT | Fa_EA40387_955TT | Fa_EA40388_956TT | Fa_EA40389_957TT |
|---|---|---|---|---|---|
| 142 | 22.9 | 18.9 | 16.7 | 14.2 | 10.8 |
| 219 | 95.6 | 18.5 | 23.3 | 51 | 29.1 |
| 309 | 32.6 | 49.2 | 18.7 | 11.4 | 26.7 |

| | Fa_EA40390_959TT | Fa_EA40391_960TT | Fa_EA40392_961TT | Fa_EA40393_962TT | PC_829TT | PC_830TT |
|---|---|---|---|---|---|---|
| 142 | 21.4 | 18.6 | 16.5 | 21.9 | 26 | 34.7 |
| 219 | 25.7 | 67 | 20.8 | 21 | 36.8 | 136.4 |
| 309 | 44.2 | 20.6 | 34.1 | 35.2 | 88.8 | 136.6 |

| | PC_831TT | PC_832TT | PC_834TT | PC_835TT | PC_836TT | PC_837TT | PC_838TT | PC_839TT |
|---|---|---|---|---|---|---|---|---|
| 142 | 22.4 | 19.1 | 16.4 | 25.8 | 12.1 | 22.5 | 15.4 | 16.1 |
| 219 | 64.9 | 24.3 | 19.1 | 25.9 | 11.7 | 13.6 | 23.8 | 26.8 |
| 309 | 48.8 | 22.1 | 23.6 | 40.5 | 16.5 | 33.9 | 24.7 | 340.8 |
| | PC_879TT | PC_881TT | PC_882TT | PC_883TT | PC_884TT | PC_885TT | PC_886TT | PC_890TT |
| 142 | 21.2 | 23.5 | 7.6 | 21.5 | 30.6 | 26.4 | 22.6 | 8.7 |
| 219 | 30.4 | 13.3 | 78.6 | 34.3 | 34.8 | 131.8 | 12 | 25.9 |
| 309 | 33.7 | 32 | 22.8 | 29.8 | 45.9 | 89.7 | 47.4 | 58.6 |
| | PC_892TT | PC_893TT | PC_894TT | PC_903TT | PC_904TT | PC_928TT | PC_932TT | PC_933TT |
| 142 | 10.8 | 18.5 | 23.6 | 14.5 | 118.3 | 7.4 | 8 | 13 |
| 219 | 48.9 | 14.4 | 96.2 | 15.1 | 80.2 | 27.7 | 54.2 | 38.2 |
| 309 | 17.8 | 23.5 | 72.3 | 11.1 | 270.7 | 15.9 | 91.5 | 18.6 |

| | Pc_EA40375_922TT | Pc_EA40381_945TT | Pc_EA40382_946TT | Pc_EA40383_947TT | Pc_EA40384_948TT |
|---|---|---|---|---|---|
| 142 | 12 | 19.6 | 13.2 | 21.6 | 16.9 |
| 219 | 22.7 | 31.8 | 63.9 | 23.8 | 18.1 |
| 309 | 30.5 | 195 | 29.7 | 53.4 | 37.9 |

| | FC_823TT | FC_824TT | FC_825TT | FC_827TT | FC_828TT | FC_840TT | FC_896TT |
|---|---|---|---|---|---|---|---|
| 142 | 19.8 | 12.5 | 35.7 | 17.7 | 19.6 | 18.9 | 20.5 |
| 219 | 24.8 | 64.8 | 82.1 | 14.1 | 60.2 | 16.2 | 46.2 |
| 309 | 15 | 33.3 | 38.4 | 14.9 | 19.5 | 17.2 | 40.2 |
| | FC_898TT | FC_899TT | FC_900TT | FC_901TT | FC_902TT | FC_909TT | FC_910TT |
| 142 | 246.2 | 18.5 | 20.7 | 25.8 | 28.6 | 17.8 | 9.9 |
| 219 | 62.7 | 39.4 | 42.1 | 92.3 | 39.4 | 117.7 | 25.9 |
| 309 | 44.3 | 43 | 20.2 | 21.3 | 63.8 | 745.6 | 9.7 |

| | Fc_EA40386_954TT | Fc_EA40394_967TT | Fc_EA40395_968TT | Fc_EA40396_969TT | Fc_EA40397_970TT |
|---|---|---|---|---|---|
| 142 | 41.7 | 30.5 | 11.8 | 19.4 | 37.4 |
| 219 | 43.2 | 42.1 | 24 | 14.1 | 43.6 |
| 309 | 53.6 | 42 | 23.5 | 14.6 | 71 |

| | Fc_EA40405_982TT | Fc_EA40406_983TT | pb1_Signal | pb2_Signal | pb3_Signal | pb4_Signal | pb5′_Signal |
|---|---|---|---|---|---|---|---|
| 142 | 16.7 | 25.7 | 1289.3 | 1088.9 | 659.7 | 732.6 | 1415 |
| 219 | 12.6 | 57.9 | 1692.6 | 1911.7 | 912 | 2112.2 | 1417.9 |
| 309 | 20.7 | 30.6 | 5357.5 | 5904 | 3572.6 | 6641.9 | 3580.9 |

| | pb6′_Signal | pb7′_Signal | pb8′_Signal | pd10_Signal | pd11_Signal | pd12_Signal | pd9_Signal |
|---|---|---|---|---|---|---|---|
| 142 | 1287.9 | 565.2 | 2004.2 | 821.9 | 904.8 | 1619.6 | 282.5 |
| 219 | 1216.7 | 411.6 | 959.7 | 1085.9 | 1974.4 | 1580.2 | 245.9 |
| 309 | 3787.2 | 1401.5 | 3537 | 3522.1 | 4518.1 | 5118.1 | 931.7 |

[0102] TABLE 15b
Signal

| SEQ ID | | | | | | | |
|---|---|---|---|---|---|---|---|
| | PC_984TT | PC_986TT | FA_987TT | PC_988TT | PC_989TT | FA_992TT | FA_993TT |
| 142 | 25.1 | 125.8 | 18.5 | 11.4 | 13.7 | 11.8 | 113.6 |
| 219 | 17.5 | 25.7 | 22.6 | 11.3 | 32.4 | 61.9 | 25.2 |
| 309 | 27.6 | 661.8 | 15.7 | 47.4 | 29.8 | 33.2 | 28.4 |
| | FA_994TT | FA_995TT | FA_996TT | FA_998TT | FA_999TT | FA_1001TT | FA_1002TT |
| 142 | 20.6 | 25.2 | 34.1 | 21.8 | 31.4 | 12.7 | 74.6 |
| 219 | 25.9 | 36.3 | 41.5 | 24.9 | 16.4 | 26.5 | 25.5 |
| 309 | 16.8 | 26.3 | 19.4 | 22.5 | 14.6 | 32.3 | 47.7 |
| | FA_1004TT | FA_1005TT | FA_1006TT | FA_1010TT | FA_1013TT | FA_1014TT | FA_1017TT |
| 142 | 24.7 | 20.1 | 67.7 | 14.9 | 48.9 | 29.8 | 26.9 |
| 219 | 27.5 | 11.7 | 53.3 | 112.9 | 35.1 | 39.5 | 27.2 |
| 309 | 39.5 | 10.3 | 34.6 | 83.2 | 46.8 | 20 | 25.7 |
| | FA_1018TT | FA_1020TT | FA_1023TT | FA_1024TT | FA_1026TT | FA_1027TT | FA_1028TT |
| 142 | 25.1 | 25.5 | 35.6 | 26.9 | 27.9 | 15.2 | 24.5 |
| 219 | 66.3 | 26 | 6.1 | 26 | 59.3 | 18.8 | 31.7 |
| 309 | 31 | 37.4 | 20.6 | 46.9 | 51.4 | 8.8 | 33.3 |
| | FA_1029TT | FA_1030TT | FA_1031TT | FA_1032TT | FA_1034TT | FA_1035TT | FC_1037TT |
| 142 | 10.6 | 14 | 20 | 21.6 | 31.9 | 17.1 | 17.8 |
| 219 | 12.5 | 33.5 | 15.1 | 15 | 68.5 | 25.6 | 63.5 |
| 309 | 20.7 | 13 | 21.5 | 32.2 | 52.6 | 24.6 | 26.2 |
| | PC_1039TT | PC_1040TT | PC_1041TT | PC_1042TT | PC_1043TT | PC_1044TT | PC_1045TT |
| 142 | 16.1 | 22.7 | 99.5 | 129.8 | 20.7 | 79.2 | 16.4 |
| 219 | 27.9 | 29.5 | 23.6 | 29 | 21.5 | 19.8 | 38.4 |
| 309 | 585.3 | 37.6 | 48.7 | 41 | 32.8 | 59.2 | 112.3 |
| | | | | | | | PC- |
| | PC_1046TT | PC_1047TT | PC_1048TT | PC_1049TT | PC_1050TT | PC_1051TT | FV_1052TT |
| 142 | 22.4 | 81.2 | 24.7 | 37.5 | 25.9 | 26.6 | 26.4 |
| 219 | 11.1 | 97.5 | 61.8 | 14.9 | 14.7 | 109.1 | 30.6 |
| 309 | 22.5 | 207.8 | 35.4 | 64 | 39.5 | 56.7 | 28.2 |
| | PC_1053TT | PC_1054TT | PC_1055TT | PC_1059TT | PC_1060TT | PC_1061TT | PC_1062TT |
| 142 | 12.8 | 18.5 | 24.4 | 22.7 | 24.6 | 15.8 | 25.6 |
| 219 | 12.6 | 19.6 | 10.2 | 24.5 | 82.6 | 53.7 | 20.7 |
| 309 | 20.4 | 22.1 | 24 | 18.9 | 32.3 | 54.5 | 29.1 |
| | PC- | PC- | PC- | PC- | PC- | PC- | PC- |
| | FV_1064TT | FV_1065TT | FV_1066TT | FV_1067TT | FV_1068TT | FV_1069TT | FV_1071TT |
| 142 | 16.7 | 11.3 | 25.5 | 17.4 | 17.5 | 14 | 16.7 |
| 219 | 174.4 | 20.3 | 132.4 | 24.8 | 12.3 | 14.8 | 18.8 |
| 309 | 30.4 | 169.6 | 49.4 | 16.9 | 135.5 | 18.1 | 7.6 |
| | PC- | | | | | | |
| | FV_1072TT | FA_1073TT | FA_1074TT | FA_1075TT | FA_1076TT | FC_1077TT | FC_1078TT |
| 142 | 14 | 25.5 | 22.7 | 27 | 16.4 | 15.8 | 38.9 |
| 219 | 8.7 | 73.2 | 57 | 54.3 | 69.9 | 20 | 17.1 |
| 309 | 29.9 | 145.4 | 21 | 53 | 24.3 | 9.1 | 32.9 |

| | | | PC- | | | | | |
|---|---|---|---|---|---|---|---|---|
| | FC_1079TT | PC-FV_1080TT | FV_1081TT | FC_1082TT | pb1 | pb2 | pb3 | pb4 |
| 142 | 31.9 | 10.2 | 22 | 19.5 | 1289.3 | 1088.9 | 659.7 | 732.6 |
| 219 | 40.1 | 17.4 | 38.3 | 88.1 | 1692.6 | 1911.7 | 912 | 2112.2 |
| 309 | 27.1 | 23.4 | 40.8 | 12.9 | 5357.5 | 5904 | 3572.6 | 6641.9 |

| | pb5′ | pb6′ | pb7′ | pb8′ | pd10 | pd11 | pd12 | pd9 |
|---|---|---|---|---|---|---|---|---|
| 142 | 1415 | 1287.9 | 565.2 | 2004.2 | 821.9 | 904.8 | 1619.6 | 282.5 |
| 219 | 1417.9 | 1216.7 | 411.6 | 959.7 | 1085.9 | 1974.4 | 1580.2 | 245.9 |
| 309 | 3580.9 | 3787.2 | 1401.5 | 3537 | 3522.1 | 4518.1 | 5118.1 | 931.7 |

F. Signature Normalized to Control Genes

[0103] We further examined our 5-gene and 4-gene signatures by normalizing these genes to the three selected thyroid control genes as an algorithm for gene chip data normalization. The average fluorescent intensities of the three thyroid control genes were used for signature gene signal normalization. The performance of both signatures improved slightly when these two signatures were normalized. The sensitivity and specificity of the two signatures are listed in Table 16, and the ROC curves are shown in FIGS. 4a and 4b.

TABLE 16
The performances of the 4-gene and 5-gene signatures normalized
to control genes

| | |
|---|---|
| Tumor | Benign |

4-Gene Signature

| | | |
|---|---|---|
| Positive | 33 | 11 |
| Negative | 3 | 27 |

| | |
|---|---|
| Sensitivity | 92% (0.78, 0.97) |
| Specificity | 71% (0.55, 0.83) |

5-Gene Signature

| | | |
|---|---|---|
| Positive | 33 | 8 |
| Negative | 3 | 30 |

| | |
|---|---|
| Sensitivity | 92% (0.78, 0.97) |
| Specificity | 79% (0.64, 0.89) |

G. Signature Validation with Two-Round Amplified Probes

[0104] To determine if the FNA samples lack sufficient thyroid cells to provide enough probe material for hybridizing to the Affymetrix U133a gene chips after one round of amplification, two-round amplification of the target RNAs we performed two-round amplification with 47 samples that are among the 74 independent validation sample set. The data obtained show that the performances of the 5-gene and 4-gene signatures are identical with either one-round or two-round amplifications. The ROC curves of the two gene signatures with two different target preparations are shown in FIGS. 5a, 5b, 5c, and 5d.

### EXAMPLE 4

### Cross Validation with Independent Samples

A. Cross Validation with the 83 Independent Fresh Frozen Thyroid Samples

[0105] 83 independent thyroid samples were processed and profiled with the U133a chip. The number of samples in each category is list in Table 17.

TABLE 17
Fresh Frozen sample collection for signature validation

| Sample Type | Number of Samples |
|---|---|
| Follicular Adenoma | 18 |
| Follicular Thyroid Carcinoma | 1 |
| Papillary Carcinoma, Follicular Variant | 18 |
| Papillary Thyroid Carcinoma | 11 |
| Adenomatoid Nodules | 18 |
| Adenomatoid Nodules w/Hashimoto | 1 |
| Multinodular Hyperplasia | 16 |

[0106] The performance of the 4-gene signature and the 5-gene signature was assessed with LDA using the same cut-off value as in the training set. Both signatures gave equivalent performance in these samples, and they are comparable with the performance in the 98 training set. The sensitivity and specificity for both signatures are shown in Table 18, and the ROC curves are demonstrated in FIGS. 6a and 6b.

TABLE 18
4-Gene and 5-gene signatures performance in 83 validation samples

| | |
|---|---|
| Tumor | Benign |

4-Gene Signature

| | | |
|---|---|---|
| Positive | 20 | 11 |
| Negative | 10 | 42 |

| | |
|---|---|
| Sensitivity | 67% (0.49, 0.81) |
| Specificity | 79% (0.67, 0.88) |

5-Gene Signature

| | | |
|---|---|---|
| Positive | 24 | 24 |
| Negative | 6 | 29 |

| | |
|---|---|
| Sensitivity | 80% (0.63, 0.90) |
| Specificity | 55% (0.41, 0.67) |

B. Signature Validation with the 47 Fine Needle Aspirate (FNA) Thyroid Samples

[0107] 47 thyroid FNA samples were processed and profiled with the UI33a chip. The number of samples in each category is list in Table 19.

TABLE 19
FNA sample collection for signature validation

| Sample Type | Number of Samples |
|---|---|
| Follicular Adenoma | 10 |
| Follicular Thyroid Carcinoma | 2 |
| Papillary Carcinoma, Follicular Variant | 3 |
| Papillary Thyroid Carcinoma | 13 |
| Adenomatoid Nodules | 10 |
| Adenomatoid Nodules w/Hashimoto | 1 |
| Multinodular Hyperplasia | 8 |

[0108] The performance of the 4-gene signature and the 5-gene signature was assessed with LDA model. Both signatures gave equivalent performance in the FNA samples, and they are comparable with the performance in the 98 training set. The sensitivity and specificity for both signatures are shown in Table 20, and the ROC curves are demonstrated in FIGS. 7a and 7b.

TABLE 20
4-Gene and 5-gene signatures performance in 47 FNA samples

| | |
|---|---|
| Tumor | Benign |

4-Gene Signature

| | | |
|---|---|---|
| Positive | 15 | 4 |
| Negative | 3 | 25 |

| | |
|---|---|
| Sensitivity | 94% (0.74, 0.99) |
| Specificity | 62% (0.44, 0.77) |

5-Gene Signature

| | | |
|---|---|---|
| Positive | 17 | 10 |
| Negative | 1 | 19 |

| | |
|---|---|
| Sensitivity | 94% (0.74, 0.99 |
| Specificity | 66% (0.47, 0.80) |

C. Signature Performance in 28 Paired Fresh Frozen and FNA Thyroid Samples

[0109] Within the 83 fresh frozen and the 47 FNA sample collections there are 28 samples that were from the same patient. The direct comparison of our signatures in these paired samples demonstrates how well the signature will translate into the final molecular assay. The performance of the 4-gene signature and the 5-gene signature was assessed with the LDA model. Both signatures gave equivalent performance in the fresh frozen and FNA samples. These results demonstrated that our 4-gene and 5-gene signatures can perform equally well in both sample types, and proved the approach using fresh frozen samples for gene/signature identification is valid. The sensitivity and specificity for both signatures are shown in Table 21, and the ROC curves are demonstrated in FIGS. 8a and 8b.

TABLE 21
4-Gene and 5-gene signatures performance in 28 matched
fresh frozen and FNA samples

| | |
|---|---|
| Fresh Frozen | FNA |

| | | | |
|---|---|---|---|
| Tumor | Benign | Tumor | Benign |

4-Gene Signature

| | | | | |
|---|---|---|---|---|
| Positive | 10 | 4 | 12 | 7 |
| Negative | 3 | 11 | 1 | 8 |

| | | |
|---|---|---|
| Sensitivity | 77% (0.50-0.92) | 92% (0.67-0.99) |
| Specificity | 73% (0.48-0.89) | 53% (0.30-0.75) |

5-Gene Signature

| | | | | |
|---|---|---|---|---|
| Positive | 11 | 7 | 12 | 7 |
| Negative | 2 | 8 | 1 | 8 |

| | | |
|---|---|---|
| Sensitivity | 85% (0.58-0.96) | 92% (0.67-0.99) |
| Specificity | 53% (0.30-0.75) | 53% (0.30-0.75) |

### EXAMPLE 5

### Real-Time Quantitative Rt-PCR

Sample Acquisition:

[0110] In order to determine whether a subset of the gene profiles and/or controls would give adequate specificity and sensitivity with RT-PCR, the following experiment was performed. The following has the advantage of requiring only one round of RNA amplification.

[0111] A total of 107 thyroid biopsies were analyzed in our study: 26 follicular adenoma, 23 follicular carcinoma, 38 papillary carcinoma, 5 normal, 3 papillary carcinoma follicular variant, 3 Hashimoto thyroiditis, 2 microfollicular adenoma, 1 diffuse goiter, 1 goiter with papillary hyperplasia, 1 Hurthle cell adenoma, 1 hyperplasia with papillary structure, 1 multinodular goiter, 1 oncocytic hyperplasia, 1 thyroiditis. Total RNA isolation was extracted by using the Trizol reagent according to the manufacturer's instructions. RNA concentrations were determined by absorbance readings at 260 nm with the Gene-Spec (Hitachi) spectrophotometer. The isolated RNA was stored in RNase-free water at −80° C. until use.

Primer and Probe Design:

[0112] The primers and hydrolysis probes were designed using Oligo 6.0 and the Genebank sequences for thyroid cancer status markers (Table 22). These primers and probe sets were designed such that the annealing temperature of the primers was 62° C. and the probes 5-10° C. higher and amplicon size ranges from 100-150 bp. Genomic DNA amplification was excluded by designing our primers around exon-intron splicing sites. Hydrolysis probes were labeled at the 5′ nucleotide with FAM as the reporter dye and at 3′ nucleotide with TAMRA as the quenching dye.

TABLE 22

| | Accession | | | | Product |
|---|---|---|---|---|---|
| Target | # | Forward Primer (SEQ ID NO:) | Reverse Primer (SEQ ID NO:) | Probe Sequence (SEQ ID NO:) | Length |
| SGENE | NM_003020 | gaaagcggaggagtgtcaatcca (364) | ggttttcgtctagcatcttctcttta (365) | atctacaaggacagagactggataatgttg (366) | 130 |
| TESTICAN1 | AF231124 | gtgagctgtgaagaggagcaggaa (367) | ctttggtcccagctcccgttca (368) | cctcaggggattttggcagtggtgggtccg (369) | 102 |
| GABRE | NM_004961 | taaactccgccatcctcgtatcaa (370) | cagtggtgacaatctggcacacaa (371) | ccgtgcccatgcccgtacccgtgca (372) | 113 |
| CDH3 | NM_001793 | ctgaagcaggatacatatgacgtgca (373) | agggtccagggcaggtttcgaca (374) | catggcagtcgcacacagtggccctga (375) | 124 |
| FN1 | NM_002026 | tggtgccatgacaatggtgtgaacta (376) | catcatcgtaacacgttgcctcatga (377) | aagattggagagaagtgggaccgtcaggga (378) | 148 |
| TPO-1 | NM_000547 | catctgtgacaacactggcctca (379) | gccacacttgtcgtcttgaggaa (380) | caaattccccgaagactttgagtcttgtgacagc (381) | 148 |
| TPO-2 | NM_000547 | aacctgcgtagactccgggaggc (382) | gccagtgcgtgtccacctgca (383) | ctcgggtgacttggatctccatgtcgctgg (384) | 124 |
| KCNAB1-1 | NM_003471 | tgaaagttccagggcttcactgaa (385) | agctgaggtagtgtgcatcccaga (386) | ctaccagtggttgaaagaaagaattgtaagtgaag (387) | 138 |
| KCNAB1-2 | NM_003471 | tagctgttgcgtggtgcctgagaa (388) | tgatgtcatctttgggagaacctgaa (389) | aaggtgtgagttctgtgctcctgggatcat (390) | 119 |
| FABP4-1 | NM_001442 | gaaagaagtaggagtgggctttgcca (391) | ggcccagtatgaaggaaatctcagta (392) | aaaggtactttcagatttaatggtgatcacatccc (393) | 143 |
| FABP4-2 | NM_001442 | aggaaagtcaagagcaccataacctta (394) | gacgcattccaccaccagtttatca (395) | ttgattttccatcccatttctgcacatgta (396) | 123 |
| DOI1-1 | NM_000792 | gggtaaatctggcccttggaactaca (397) | cccgttggtcacctagaattgaggta (398) | cccagaggaagttcgtgctgttctggaaaa (399) | 106 |
| DOI1-2 | NM_000792 | tgcatcagatggctgggctttta (400) | gctctggttctgcatggtgtcca (401) | catcagaaatcaccagaaccttcaggatcg (402) | 142 |
| B-ACTIN | NM_001101 | tcacccacactgtgcccatctacga (403) | cagcggaaccgctcattgccaatgg (404) | atgccctcccccatgccatcctgcgt (405) | 295 |
| GOLGIN67 | NM_015003 | gcatggtgatctttgtgaggcga (406) | ctcctggtggtcctgcatctca (407) | ctcaccaacagcgtggagcctgcacaagga (408) | 139 |
| PAX8 | BC001060 | actccagcttgctgagttcccca (409) | actccagcttgctgagttcccca (410) | attattacagttccacatcaaggccgagtgca (411) | 125 |
| HERC | NM_003922 | gggtgcttttcatgaggtttgtgtca (412) | tgaggtaggcagactgtcgtaaggcc (413) | ccaacactgctgacatttctcagagatttcaaat (414) | 219 |
| DDIT3 | NM_004083 | cctggaaatgaagaggaagaatcaa (415) | agctctgactggaatctggagagtga (416) | aatcttcaccactcttgaccctgcttctctgg (417) | 142 |
| ITM1 | NM_152713 | tggctggtcaggatatacaaggtaaa (418) | tcaacgtcctaaatgtgatgtgctca (419) | cctggataatcgaggcttgtcaaggacataaa (420) | 117 |
| C1OF24 | NM_052966 | tctgaaagtgataaaggaagctgcta (421) | ctttagatctgttaagctggacacac (422) | cttgaagaaacacaacttatttgaagataacatg (423) | 103 |
| MOT8 | NM_018836 | acggcctataacgagaccctgca (424) | gaagaggagggtcggtttccattaa (425) | ttctcacgagtgcgtcagggcatctgtgc (426) | 133 |
| ARG2 | NM_00172 | atttgaccctacactggctccagc (427) | gatccagtgctgatagcaaccctgta (428) | actcctgttgtcgggggactaacctatcgaga (429) | 119 |

Real-Time Quantitative RT-PCR:

[0113] Gene specific real-time quantitative RT-PCR amplification of 21 thyroid cancer status genes and a housekeeping gene was performed using the TaqMan One-Step RT-PCR Master Mix (2×) (Applied Biosystems) and the ABI Prism 7900HT sequence detection system (Applied Biosystems). In a 25 μl one-step reaction total RNA (10 ng) was added to a mix that contained: 1×RT-PCR Master Mix, 0.25 U/μl Multiscribe Enzyme, 0.6 μM primers and 0.25 μM probe. Cycling parameters were 48° C. for 30 min and 95° C. 10 min, followed by 40 cycles of 95° C. 15 sec and 62° C. 1 min. Real-time PCR monitoring was achieved by measuring fluorescent signal at the end of the annealing phase for each cycle. The number of cycles to reach the fluorescence threshold was defined as the cycle threshold (Ct value). To minimize the errors arising from the integrity of the RNA in the samples β-actin mRNA was amplified as an internal reference. External standards were prepared by 10-fold serial dilutions of known thyroid cancer positive RNA and used to ensure linearity throughout our assays. Results were expressed in mean Ct value and samples were excluded that had a standard deviation greater then one. The results are provided in Tables 23a, 23b, 23c, 24a and 24b.

[0114] The data show that the two gene signature shown in Table 23b is not as sensitive and specific as the four-gene signature from which it was derived. Table 24 shows that use of the PAX8 gene in an RT-PCR reaction as a control for thyroid-specific tissue is effective in an RT-PCR reaction.

[0115] Although the foregoing invention has been described in some detail by way of illustration and example for purposes of clarity of understanding, the descriptions and examples should not be construed as limiting the scope of the invention.

TABLE 23A

[chemical structure]

[chemical structure]

[chemical structure]

[chemical structure]

[chemical structure]

[chemical structure]

[chemical structure]

[chemical structure]

[chemical structure]

[0116] TABLE 23B

[chemical structure]

[chemical structure]

[chemical structure]

[chemical structure]

[chemical structure]

[chemical structure]

[0117] TABLE 23C

[chemical structure]

[chemical structure]

[chemical structure]

[chemical structure]

[chemical structure]

[0118] TABLE 24A

[chemical structure]

[chemical structure]

[chemical structure]

[chemical structure]

[chemical structure]

[0119] TABLE 24B

[chemical structure]

[chemical structure]

[chemical structure]

[chemical structure]

[chemical structure]

[chemical structure]

[0120] TABLE 25
Sequence identifications

| SEQ | | | Accession | |
|---|---|---|---|---|
| NO: | psid | Name | No. | Description |
| 1 | 200635_s_at | | AU145351 | Hs.75216 prot tyrosine phosphatase, rec. |
| | | | | type, F |
| 2 | 200771_at | | NM_002293 | laminin, gamma 1 |
| 3 | 201069_at | | NM_004530 | matrix metalloproteinase 2 |
| 4 | 201117_s_at | CPE | NM_001873 | carboxypeptidase E |
| 5 | 201150_s_at | | NM_000362 | tissue inhibitor of metalloproteinase 3 |
| 6 | 201185_at | | NM_002775 | protease, serine, 11 |
| 7 | 201203_s_at | | AI921320 | ribosome binding protein 1 |
| 8 | 201212_at | | NM_005606 | cysteine protease |
| 9 | 201289_at | CYR61 | NM_001554 | cysteine-rich, angiogenic inducer, 61 |
| 10 | 201292_at | | NM_001067 | topoisomerase (DNA) II alpha |
| 11 | 201418_s_at | SOX4 | NM_003107 | SRY (sex determining region Y)-box 4 |
| 12 | 201427_s_at | SEPP1 | NM_005410 | Selenoprotein P, plasma, 1 |
| 13 | 201430_s_at | DPYSL3 | NM_001387 | dihydropyrimidinase-like 3 |
| 14 | 201431_s_at | DPYSL3 | NM_001387 | dihydropyrimidinase-like 3 |
| 15 | 201438_at | COL6A3 | NM_004369 | collagen, type VI, alpha 3 |
| 16 | 201474_s_at | ITGA3 | NM_002204 | integrin, α 3 transcript variant a |
| 17 | 201505_at | LAMB1 | NM_002291 | laminin, beta 1 |
| 18 | 201508_at | IGFBP4 | NM_001552 | Insulin-like growth factor-binding protein 4 |
| 19 | 201525_at | APOD | NM_001647 | apolipoprotein D |
| 20 | 201645_at | HXB | NM_002160 | hexabrachion (tenascin C, cytotactin) |
| 21 | 201650_at | KRT19 | NM_002276 | keratin 19 |
| 22 | 201667_at | GJA1 | NM_000165 | gap junction protein, α 1, 43 kD (connexin 43) |
| 23 | 201744_s_at | LUM | NM_002345 | lumican |
| 24 | 201792_at | AEBP1 | NM_001129 | AE-binding protein 1 |
| 25 | 201852_x_at | | AI813758 | Collagen, type III, alpha 1 |
| 26 | 201893_x_at | | AF138300 | decorin variant A |
| 27 | 201983_s_at | | AW157070 | epidermal growth factor receptor |
| 28 | 202133_at | | AA081084 | Transcriptional co-activator w PDZ-binding |
| | | | | motif |
| 29 | 202219_at | SLC6A8 | NM_005629 | solute carrier family 6, member 8 |
| 30 | 202237_at | NNMT | NM_006169 | nicotinamide N-methyltransferase |
| 31 | 202286_s_at | | NM_002353 | tumor-associated calcium signal transducer 2 |
| 32 | 202291_s_at | | NM_000900 | matrix Gla protein |
| 33 | 202310_s_at | | NM_000088 | proalpha 1 (I) chain of type I procollagen |
| 34 | 202350_s_at | MATN2 | NM_002380 | matrilin 2 precursor, transcript variant 1 |
| 35 | 202357_s_at | BF | NM_001710 | B-factor, properdin |
| 36 | 202363_at | | AF231124 | testican-1 |
| 37 | 202376_at | SERPINA3 | NM_001085 | Ser (or Cys) proteinase inhib clade A mem 3 |
| 38 | 202404_s_at | COL1A2 | NM_000089 | collagen, type I, alpha 2 |
| 39 | 202440_s_at | | NM_005418 | suppression of tumorigenicity 5 |
| 40 | 202504_at | ATDC | NM_012101 | ataxia-telangiectasia group D-assoc. protein |
| 41 | 202575_at | CRABP2 | NM_001878 | cellular retinoic acid-binding protein 2 |
| 42 | 202588_at | AK1 | NM_000476 | adenylate kinase 1 |
| 43 | 202712_s_at | CKMT1 | NM_020990 | creatine kinase, mitochondrial 1 |
| 44 | 202796_at | KIAA1029 | NM_007286 | synaptopodin |
| 45 | 202826_at | SPINT1 | NM_003710 | serine protease inhibitor, Kunitz type 1 |
| 46 | 202834_at | SERPINA8 | NM_000029 | Ser (or Cys) proteinase inhib, clade A mem 8 |
| 47 | 202898_at | KIAA0468 | NM_014654 | KIAA0468 gene product |
| 48 | 202992_at | C7 | NM_000587 | complement component 7 |
| 49 | 203021_at | SLPI | NM_003064 | secretory leukocyte protease inhibitor |
| 50 | 203083_at | THBS2 | NM_003247 | thrombospondin 2 |
| 51 | 203180_at | ALDH1A3 | NM_000693 | aldehyde dehydrogenase 1 family, mem. A3 |
| 52 | 203228_at | PAFAH1B3 | NM_002573 | platelet-activating factor acetylhydrolase, |
| | | | | isoform lb, γ sub |
| 53 | 203256_at | CDH3 | NM_001793 | cadherin 3, type 1, P-cadherin (placental) |
| 54 | 203349_s_at | ETV5 | NM_004454 | ets variant gene 5 (ets-related molecule) |
| 55 | 203352_at | ORC4L | NM_002552 | origin recognition complex, subunit 4-like |
| 56 | 203354_s_at | | NM_015310 | |
| 57 | 203381_s_at | | NM_000041 | |
| 58 | 203382_s_at | APOE | NM_000041 | apolipoprotein E |
| 59 | 203407_at | PPL | NM_002705 | periplakin |
| 60 | 203417_at | MFAP2 | NM_017459 | microfibrillar-associated protein 2, tran var 1 |
| 61 | 203438_at | | NM_003714 | stanniocalcin 2 |
| 62 | 203453_at | SCNN1A | NM_001038 | sodium channel, nonvoltage-gated 1 α |
| 63 | 203499_at | EPHA2 | NM_004431 | EphA2 |
| 64 | 203548_s_at | | NM_000237 | lipoprotein lipase |
| 65 | 203570_at | LOXL1 | NM_005576 | lysyl oxidase-like 1 |
| 66 | 203632_s_at | GPRC5B | NM_016235 | G protein-coupled rec, fam C, group 5, mem B |
| 67 | 203673_at | TG | NM_003235 | thyroglobulin |
| 68 | 203699_s_at | | NM_013989 | type II iodothyronine deiodinase |
| 69 | 203700_s_at | DIO2 | NM_013989 | deiodinase, iodothyronine, type II, tran var 1 |
| 70 | 203786_s_at | TPD52L1 | NM_003287 | tumor protein D52-like 1 |
| 71 | 203851_at | IGFBP6 | NM_002178 | insulin-like growth factor binding protein 6 |
| 72 | 203854_at | IF | NM_000204 | I factor (complement) |
| 73 | 203859_s_at | PALM | NM_002579 | paralemmin |
| 74 | 203875_at | | NM_003069 | SWISNF related, matrix assoc, actin dep |
| | | | | regulator of chromatin subfam a mem 1 |
| 75 | 203881_s_at | | NM_004010 | dystrophin, includes DXS142, DXS164, |
| | | | | DXS206, DXS230, DXS239, DXS268, |
| | | | | DXS269, DXS270, DXS272 (DMD), transcript |
| | | | | variant Dp427p2 |
| 76 | 203889_at | SGNE1 | NM_003020 | secretory granule, neuroendocrine protein 1 |
| 77 | 203911_at | RAP1GA1 | NM_002885 | RAP1, GTPase activating protein 1 |
| 78 | 203934_at | KDR | NM_002253 | kinase insert domain receptor |
| 79 | 203986_at | GENX-3414 | NM_003943 | genethonin 1 |
| 80 | 204105_s_at | NRCAM | NM_005010 | neuronal cell adhesion molecule |
| 81 | 204124_at | NaPi-IIb | AF146796 | Na dependent phosphate transporter isoform |
| 82 | 204149_s_at | GSTM4 | NM_000850 | glutathione S-transferase M4 |
| 83 | 204152_s_at | | AI738965 | manic fringe (Drosophila) homolog |
| 84 | 204154_at | CDO1 | NM_001801 | cysteine dioxygenase, type I |
| 85 | 204259_at | MMP7 | NM_002423 | matrix metalloproteinase 7 (matrilysin, uterine) |
| 86 | 204260_at | CHGB | NM_001819 | chromogranin B (secretogranin 1) |
| 87 | 204268_at | S100A2 | NM_005978 | S100 calcium-binding protein A2 |
| 88 | 204288_s_at | ARGBP2 | NM_021069 | ArgAbl-interacting prot ArgBP2, trans var 2 |
| 89 | 204298_s_at | LOX | NM_002317 | lysyl oxidase |
| 90 | 204337_at | | NM_005613 | regulator of G-protein signalling 4 |
| 91 | 204416_x_at | APOC1 | NM_001645 | apolipoprotein C-I |
| 92 | 204424_s_at | | NM_018640 | neuronal specific transcription factor DAT1 |
| 93 | 204433_s_at | | NM_006038 | spermatogenesis associated PD1 |
| 94 | 204442_x_at | LTBP4 | NM_003573 | latent transforming GFβ binding protein 4 |
| 95 | 204452_s_at | | NM_003505 | frizzled 1 |
| 96 | 204476_s_at | PC | NM_022172 | pyruvate carboxylase |
| 97 | 204503_at | EVPL | NM_001988 | envoplakin |
| 98 | 204591_at | CHL1 | NM_006614 | cell adhesion molecule w/ homology to |
| | | | | L1CAM homolog L1 |
| 99 | 204600_at | EPHB3 | NM_004443 | EphB3 |
| 100 | 204623_at | TFF3 | NM_003226 | trefoil factor 3 (intestinal) |
| 101 | 204625_s_at | | NM_000212 | integrin, β 3 (platelet glycoprotein IIIa, CD61) |
| 102 | 204697_s_at | CHGA | NM_001275 | chromogranin A |
| 103 | 204741_at | BICD1 | NM_001714 | Bicaudal D (Drosophila) homolog 1 |
| 104 | 204753_s_at | HLF | NM_002126 | hepatic leukemia factor |
| 105 | 204754_at | HLF | NM_002126 | hepatic leukemia factor |
| 106 | 204755_x_at | HLF | NM_002126 | hepatic leukemia factor |
| 107 | 204787_at | Z39IG | NM_007268 | Ig superfamily protein |
| 108 | 204797_s_at | EMAPL | NM_004434 | echinoderm microtubule-associated pro-like |
| 109 | 204869_at | | AL031664 | DNA seq RP4-531H16 chrom 20p11.22-12 |
| 110 | 204870_s_at | PCSK2 | NM_002594 | proprotein convertase subtilisinkexin type 2 |
| 111 | 204933_s_at | TNFRSF11B | NM_002546 | TNFR superfamily, member 11b |
| 112 | 204934_s_at | HPN | NM_002151 | hepsin (transmembrane protease, serine 1) |
| 113 | 204944_at | PTPRG | NM_002841 | protein tyrosine phosphatase receptor type G |
| 114 | 204964_s_at | SSPN | NM_005086 | sarcospan (Kras oncogene-associated gene) |
| 115 | 204975_at | EMP2 | NM_001424 | epithelial membrane protein 2 |
| 116 | 204990_s_at | ITGB4 | NM_000213 | integrin, beta 4 |
| 117 | 205051_s_at | KIT | NM_000222 | v-kit Hardy-Zuckerman 4 feline sarcoma viral |
| | | | | oncogene homolog |
| 118 | 205110_s_at | FGF13 | NM_004114 | fibroblast growth factor 13 |
| 119 | 205153_s_at | TNFRSF5 | NM_001250 | TNFR superfamily, mem 5 |
| 120 | 205168_at | DDR2 | NM_006182 | discoidin domain receptor family, member 2 |
| 121 | 205258_at | INHBB | NM_002193 | inhibin, β B (activin AB β polypeptide) |
| 122 | 205286_at | | NM_003222 | transcription factor AP-2 gamma |
| 123 | 205325_at | KIAA0273 | NM_014759 | KIAA0273 gene product |
| 124 | 205336_at | PVALB | NM_002854 | parvalbumin |
| 125 | 205402_x_at | PRSS2 | NM_002770 | protease, serine, 2 (trypsin 2) |
| 126 | 205413_at | C11ORF8 | NM_001584 | chromosome 11 open reading frame 8 |
| 127 | 205455_at | MST1R | NM_002447 | macrophage stimulating 1 receptor |
| 128 | 205470_s_at | KLK11 | NM_006853 | kallikrein 11 |
| 129 | 205479_s_at | PLAU | NM_002658 | plasminogen activator, urokinase |
| 130 | 205481_at | ADORA1 | NM_000674 | adenosine A1 receptor |
| 131 | 205485_at | RYR1 | NM_000540 | ryanodine receptor 1 (skeletal) |
| 132 | 205490_x_at | connexin 31 | NM_024009 | gap junction protein, beta 3, 31 kD |
| 133 | 205531_s_at | GA | NM_013267 | breast cell glutaminase |
| 134 | 205593_s_at | PDE9A | NM_002606 | phosphodiesterase 9A |
| 135 | 205614_x_at | MST1 | NM_020998 | macrophage stimulating 1 |
| 136 | 205627_at | | NM_001785 | cytidine deaminase |
| 137 | 205639_at | | NM_001637 | acyloxyacyl hydrolase |
| 138 | 205683_x_at | TPSB1 | NM_003294 | tryptase beta 1 |
| 139 | 205689_at | KIAA0435 | NM_014801 | KIAA0435 gene product |
| 140 | 205700_at | RODH | NM_003725 | oxidative 3 α hydroxysteroid dehydrogenase; |
| | | | | retinol dehydrogenase; 3-hydroxysteroid |
| | | | | epimerase |
| 141 | 205710_at | LRP2 | NM_004525 | low density lipoprotein-related protein 2 |
| 142 | 205715_at | BST1 | NM_004334 | bone marrow stromal cell antigen 1 |
| 143 | 205717_x_at | | NM_002588 | protocadherin gamma subfamily C, 3 |
| 144 | 205728_at | | AL022718 | DNA seq from clone 1052M9 on chrom Xq25 |
| 145 | 205747_at | CBLN1 | NM_004352 | cerebellin 1 precursor |
| 146 | 205778_at | KLK7 | NM_005046 | kallikrein 7 (chymotryptic, stratum corneum) |
| 147 | 205858_at | NGFR | NM_002507 | nerve growth factor receptor |
| 148 | 205927_s_at | CTSE | NM_001910 | cathepsin E |
| 149 | 205980_s_at | ARHGAP8 | NM_015366 | Rho GTPase activating protein 8 |
| 150 | 206002_at | GPR64 | NM_005756 | G protein-coupled receptor 64 |
| 151 | 206114_at | EPHA4 | NM_004438 | EphA4 |
| 152 | 206390_x_at | | NM_002619 | platelet factor 4 |
| 153 | 206594_at | KIAA0135 | NM_015148 | KIAA0135 protein |
| 154 | 206595_at | CST6 | NM_001323 | cystatin EM |
| 155 | 206714_at | ALOX15B | NM_001141 | arachidonate 15-lipoxygenase, second type |
| 156 | 206757_at | PDE5A | NM_001083 | phosphodiesterase 5A, cGMP-specific |
| 157 | 206866_at | CDH4 | NM_001794 | cadherin 4, type 1, R-cadherin (retinal) |
| 158 | 206884_s_at | SCEL | NM_003843 | sciellin |
| 159 | 206912_at | FOXE1 | NM_004473 | forkhead box E1 (thyroid transcription factor2) |
| 160 | 207111_at | | NM_001974 | egf-like module cont., mucin-like, hormone |
| | | | | rec-like seq 1 |
| 161 | 207144_s_at | CITED1 | NM_004143 | Cbpp300-interacting transactivator, with |
| | | | | GluAsp-rich carboxy-terminal domain, 1 |
| 162 | 207173_x_at | | NM_001797 | OB-cadherin-1 |
| 163 | 207674_at | FCAR | NM_002000 | Fc fragment of IgA |
| 164 | 207695_s_at | IGSF1 | NM_001555 | immunoglobulin superfamily, member 1 |
| 165 | 207795_s_at | CD94 | AB009597 | |
| 166 | 207826_s_at | ID3 | NM_002167 | inhibitor of DNA binding 3, dominant negative |
| | | | | helix-loop-helix protein |
| 167 | 207923_x_at | PAX8 | NM_013953 | paired box gene 8 |
| 168 | 208396_s_at | PDE1A | NM_005019 | phosphodiesterase 1A, calmodulin-dependent |
| 169 | 208451_s_at | C4B | NM_000592 | complement component 4B |
| 170 | 208712_at | PRAD1 | M73554 | cyclinD1 |
| 171 | 208747_s_at | | NM_001734 | subcomponent C1s, α- and β-chains |
| 172 | 209021_x_at | | BC001331 | Similar to KIAA0652 gene product |
| 173 | 209035_at | | NM_002391 | midkine |
| 174 | 209071_s_at | | AF159570 | regulator of G-protein signalling 5 |
| 175 | 209079_x_at | | AF152318 | protocadherin gamma A1 |
| 176 | 209173_at | | NM_006408 | putative secreted protein XAG |
| 177 | 209208_at | | NM_004870 | clone 015e11 My008 protein |
| 178 | 209228_x_at | | NM_006765 | Putative prostate cancer tumor suppressor |
| 179 | 209270_at | LAMB3 | NM_000228 | laminin S B3 chain |
| 180 | 209280_at | | NM_006039 | chromosome 17 unknown product mRNA |
| 181 | 209291_at | | NM_001546 | inhibitor of DNA binding 4, dominant negative |
| | | | | helix-loop-helix protein |
| 182 | 209297_at | ITSN | AF114488 | intersectin short isoform |
| 183 | 209335_at | | AI281593 | |
| 184 | 209365_s_at | ECM1 | NM_004425 | extracellular matrix protein 1 |
| 185 | 209386_at | | AI346835 | transmembrane 4 superfamily member 1 |
| 186 | 209485_s_at | ORP1 | AF274714 | oxysterol-binding protein-related protein |
| 187 | 209496_at | | BC000069 | retinoic acid receptor responder 2 |
| 188 | 209505_at | | NM_005654 | nuclear receptor subfam 2, group F, mem 1 |
| 189 | 209506_s_at | | BC004154 | nuclear receptor subfam 2, group F, mem 1 |
| 190 | 209529_at | | AF047760 | phosphatidic acid phosphohydrolase type-2c |
| 191 | 209596_at | | AF245505 | adlican |
| 192 | 209598_at | KIAA0883 | AB020690 | KIAA0883 protein |
| 193 | 209652_s_at | | BC001422 | Similar to placental growth factor, vascular |
| | | | | endothelial growth factor-related protein |
| 194 | 209691_s_at | | BC003541 | hypothetical protein FLJ10488 |
| 195 | 209739_s_at | | AI814551 | GS2 gene |
| 196 | 209772_s_at | | X69397 | cell surface antigen |
| 197 | 209781_s_at | T-Star | AF069681 | T-Star |
| 198 | 209792_s_at | | BC002710 | kallikrein 10 |
| 199 | 209810_at | SP-B | J02761 | pulmonary surfactant-associated protein B |
| 200 | 209897_s_at | | AF055585 | neurogenic extracellular slit protein Slit2 |
| 201 | 209924_at | | AB000221 | small inducible cytokine subfamily A (Cys- |
| | | | | Cys), mem18, pulmonary/activation-reg |
| 202 | 209946_at | | U58111 | FLT4 ligand |
| 203 | 209990_s_at | | NM_005458 | GABA-B receptor |
| 204 | 210051_at | cAMP-GEFI | U78168 | cAMP-regulated guanine nucleotide exchange |
| | | | | factor I |
| 205 | 210055_at | | NM_000369 | thyroid stimulating hormone receptor |
| 206 | 210072_at | | NM_006274 | beta chemokine Exodus-3 |
| 207 | 210078_s_at | | L39833 | K+ channel beta subunit |
| 208 | 210096_at | | NM_000779 | lung cytochrome P450 (IV subfamily) BI |
| 209 | 210298_x_at | FHL1 | AF098518 | four and 1/2 LIM domains1 protein isoform B |
| 210 | 210321_at | | M36118 | cytotoxin serine protease-C |
| 211 | 210342_s_at | TPO | NM_000547 | thyroid peroxidase |
| 212 | 210372_s_at | TPD52L2 | AF208012 | tumor protein D52-like 2 |
| 213 | 210397_at | | U73945 | beta-defensin-1 |
| 214 | 210401_at | | U45448 | P2 × 1 receptor |
| 215 | 210471_s_at | | U33428 | K+ channel β 1a subunit mRNA, alt spliced |
| 216 | 210473_s_at | p58GTA | M37712 | galactosyltransferase assoc protein kinase |
| 217 | 210605_s_at | | BC003610 | Similar to milk fat globule-EGF factor 8 |
| 218 | 210640_s_at | GPCR-Br | U63917 | G protein coupled receptor |
| 219 | 210660_at | LIR-6 | AF025529 | leucocyte immunoglobulin-like receptor-6b |
| 220 | 210727_at | | NM_001741 | Calcitonin, calcitonincalcitonin-rel polypeptide, α |
| 221 | 210762_s_at | HP | NM_006094 | HP protein |
| 222 | 210809_s_at | | D13665 | osf-2 mRNA for osteoblast specific factor 2 |
| 223 | 210827_s_at | ESE-1 | U73844 | epithelial-specific transcription factor ESE-1a |
| 224 | 211100_x_at | | U82278 | immunoglobulin-like transcript 1c |
| 225 | 211101_x_at | | U82276 | immunoglobulin-like transcript 1a |
| 226 | 211102_s_at | | U82277 | immunoglobulin-like transcript 1b |
| 227 | 211161_s_at | | AF130082 | collagen, type III, alpha 1 |
| 228 | 211217_s_at | | AF051426 | slow delayed rectifier channel subunit |
| 229 | 211538_s_at | | U56725 | heat shock 70 kD protein 2 |
| 230 | 211564_s_at | | BC003096 | Similar to LIM domain protein |
| 231 | 211679_x_at | GABBR2 | AF095784 | GABA-B receptor R2 |
| 232 | 211813_x_at | | AF138303 | decorin D |
| 233 | 211959_at | IGFBP5 | AW007532 | insulin-like growth factor binding protein 5 |
| 234 | 211964_at | | AK025912 | type IV collagen alpha (2) chain |
| 235 | 212067_s_at | | AL573058 | complement component 1, r subcomponent |
| 236 | 212253_x_at | KIAA0728 | BG253119 | KIAA0728 protein |
| 237 | 212294_at | | BG111761 | DKFZp586B0918 |
| 238 | 212328_at | KIAA1102 | AB029025 | KIAA1102 protein |
| 239 | 212344_at | KIAA1077 | AW043713 | KIAA1077 protein |
| 240 | 212353_at | KIAA1077 | AI479175 | KIAA1077 protein |
| 241 | 212354_at | KIAA1077 | BE500977 | KIAA1077 protein |
| 242 | 212464_s_at | FN | X02761 | fibronectin precursor |
| 243 | 212724_at | | NM_005168 | ras homolog gene family, member E |
| 244 | 212738_at | | AV717623 | |
| 245 | 212775_at | | AI978623 | KIAA0657 protein |
| 246 | 212803_at | | NM_005967 | NGFI-A binding protein 2 |
| 247 | 212806_at | KIAA0367 | AL138349 | KIAA0367 protein |
| 248 | 212850_s_at | | AA584297 | low density lipoprotein receptor-rel protein 4 |
| 249 | 212865_s_at | | BF449063 | collagen, type XIV, alpha 1 (undulin) |
| 250 | 212912_at | | AI992251 | Ribosomal pro S6 kinase, 90 kDa, polypep 2 |
| 251 | 212992_at | | AI935123 | |
| 252 | 213029_at | | AL110126 | DKFZp564H1916 |
| 253 | 213306_at | | AA917899 | multiple PDZ domain protein |
| 254 | 213381_at | | N91149 | DKFZp586M2022 |
| 255 | 213423_x_at | | AI884858 | Putative prostate cancer tumor suppressor |
| 256 | 213553_x_at | | W79394 | apolipoprotein C-I |
| 257 | 213668_s_at | | AI989477 | SRY (sex determining region Y)-box 4 |
| 258 | 213693_s_at | | AI610869 | mucin 1, transmembrane |
| 259 | 213800_at | | X04697 | complement factor H 38-kDa N-term frag |
| 260 | 213904_at | | AL390170 | DKFZp547E184 |
| 261 | 213924_at | FLJ11585 | BF476502 | hypothetical protein FLJ11585 |
| 262 | 214023_x_at | | AL533838 | tubulin, beta polypeptide |
| 263 | 214175_x_at | | AI254547 | LIM domain protein |
| 264 | 214239_x_at | Mel-18 | AI560455 | Zinc finger protein 144 |
| 265 | 214307_at | | AI478172 | homogentisate 1,2-dioxygenase |
| 266 | 214434_at | KIAA0417 | AB007877 | KIAA0417 gene product |
| 267 | 214632_at | | NM_003872 | neuropilin 2 |
| 268 | 214680_at | | BF674712 | neurotrophic tyrosine kinase receptor 2 |
| 269 | 214702_at | MSF-FN70 | AJ276395 | migration stimulation factor FN70 |
| 270 | 214763_at | FLJ13875 | AK023937 | FLJ13875 |
| 271 | 214803_at | | BF344237 | DKFZp564N1116 |
| 272 | 214955_at | | AI912086 | DNA seq clone 1170K4 chrom 22q12.2-13.1 |
| 273 | 214977_at | FLJ13790 | AK023852 | FLJ13790 |
| 274 | 215016_x_at | KIAA0728 | BC004912 | KIAA0728 protein |
| 275 | 215034_s_at | FLJ13302 | AI189753 | FLJ13302 |
| 276 | 215076_s_at | FLJ11428 | AU144167 | FLJ11428 |
| 277 | 215243_s_at | GJB3 | AF099730 | connexin 31 |
| 278 | 215388_s_at | | X56210 | complement Factor H-related protein 1 |
| 279 | 215442_s_at | | BE740743 | thyroid stimulating hormone receptor |
| 280 | 215443_at | | BE740743 | thyroid stimulating hormone receptor |
| 281 | 215506_s_at | | AK021882 | highly sim to putative tumor sup NOEY2 |
| 282 | 215536_at | | X87344 | DMA, DMB, HLA-Z1, IPP2, LMP2, TAP1, |
| | | | | LMP7, TAP2, DOB, DQB2 and RING8, 9, 13, |
| | | | | 14 genes |
| 283 | 216356_x_at | KIAA0734 | AB018277 | KIAA0734 protein |
| 284 | 216470_x_at | | AF009664 | T cell receptor β locus, 3 trypsinogen repeats |
| 285 | 216569_at | FABP3-ps | U72237 | fatty acid-binding protein pseudogene |
| 286 | 217546_at | | R06655 | |
| 287 | 217561_at | | BF447272 | |
| 288 | 217592_at | | AV684859 | |
| 289 | 217767_at | | NM_000064 | |
| 290 | 217820_s_at | FLJ10773 | NM_018212 | hypothetical protein FLJ10773 |
| 291 | 217875_s_at | TMEPAI | NM_020182 | transmem, prostate androgen induced RNA |
| 292 | 218002_s_at | SCYB14 | NM_004887 | small inducible cytokine subfam B (Cys-X- |
| | | | | Cys), mem 14 (BRAK) |
| 293 | 218182_s_at | CLDN1 | NM_021101 | claudin 1 |
| 294 | 218353_at | | NM_025226 | MSTP032 protein |
| 295 | 218368_s_at | FN14 | NM_016639 | type I transmembrane protein Fn14 |
| 296 | 218418_s_at | | NM_015493 | DKFZP434N161 |
| 297 | 218469_at | CKTSF1B1 | NM_013372 | Cys knot superfamily 1, BMP antagonist 1 |
| 298 | 218537_at | FLJ20568 | NM_017885 | hypothetical protein FLJ20568 |
| 299 | 218546_at | FLJ14146 | NM_024709 | hypothetical protein FLJ14146 |
| 300 | 218613_at | | NM_018422 | hypothetical protein DKFZp761K1423 |
| 301 | 218653_at | SLC25A15 | NM_014252 | solute carrier family 25 (mitochondrial carrier; |
| | | | | ornithine transporter) member 15 |
| 302 | 218691_s_at | RIL | NM_003687 | reversion-induced LIM protein |
| 303 | 218844_at | FLJ20920 | NM_025149 | hypothetical protein FLJ20920 |
| 304 | 218856_at | LOC51323 | NM_016629 | hypothetical protein LOC51323 |
| 305 | 218952_at | SAAS | NM_013271 | granin-like neuroendocrine peptide precursor |
| 306 | 218960_at | TMPRSS4 | NM_016425 | transmembrane protease, serine 4 |
| 307 | 219010_at | FLJ10901 | NM_018265 | hypothetical protein FLJ10901 |
| 308 | 219127_at | MGC11242 | NM_024320 | hypothetical protein MGC11242 |
| 309 | 219191_s_at | BIN2 | NM_016293 | bridging integrator 2 |
| 310 | 219195_at | PPARGC1 | NM_013261 | peroxisome proliferative activated receptor, γ, |
| | | | | coactivator 1 |
| 311 | 219211_at | USP18 | NM_017414 | ubiquitin specific protease 18 |
| 312 | 219277_s_at | FLJ10851 | NM_018245 | hypothetical protein FLJ10851 |
| 313 | 219331_s_at | FLJ10748 | NM_018203 | hypothetical protein FLJ10748 |
| 314 | 219416_at | CSR1 | NM_016240 | CSR1 protein |
| 315 | 219436_s_at | LOC51705 | NM_016242 | endomucin-2 |
| 316 | 219440_at | RAI2 | NM_021785 | retinoic acid induced 2 |
| 317 | 219463_at | HS1119D91 | NM_012261 | sim to S68401 (cattle) glucose induced gene |
| 318 | 219476_at | MGC4309 | NM_024115 | hypothetical protein MGC4309 |
| 319 | 219525_at | FLJ10847 | NM_018242 | hypothetical protein FLJ10847 |
| 320 | 219527_at | FLJ20605 | NM_017898 | hypothetical protein FLJ20605 |
| 321 | 219561_at | LOC51226 | NM_016429 | COPZ2 for nonclathrin coat protein zeta-COP |
| 322 | 219596_at | LOC56906 | NM_020147 | hyp protein from EUROIMAGE 511235 |
| 323 | 219597_s_at | DUOX1 | NM_017434 | dual oxidase 1 |
| 324 | 219743_at | HEY2 | NM_012259 | hairyenhancer-of-split rel with YRPW motif 2 |
| 325 | 219749_at | FLJ20967 | NM_022071 | hypothetical protein FLJ20967 |
| 326 | 219836_at | MGC10796 | NM_024508 | hypothetical protein MGC10796 |
| 327 | 219855_at | FLJ10628 | NM_018159 | hypothetical protein FLJ10628 |
| 328 | 219856_at | MGC2742 | NM_023938 | hypothetical protein MGC2742 |
| 329 | 219926_at | POP3 | NM_022361 | popeye protein 3 |
| 330 | 219932_at | VLCS-H1 | NM_014031 | v long-chain acyl-CoA synthetase homolog 1 |
| 331 | 219958_at | FLJ11190 | NM_018354 | hypothetical protein FLJ11190 |
| 332 | 220034_at | | NM_007199 | interleukin-1 receptor-associated kinase M |
| 333 | 220108_at | GNA14 | NM_004297 | guanine nucl binding protein (G protein), α 14 |
| 334 | 220332_at | CLDN16 | NM_006580 | claudin 16 |
| 335 | 220595_at | DKFZp434B0417 | NM_013377 | hypothetical protein DKFZp434B0417 |
| 336 | 220751_s_at | C5ORF4 | NM_016348 | chromosome 5 open reading frame 4 |
| 337 | 221009_s_at | PGAR | NM_016109 | PPAR(gamma) angiopoietin related protein |
| 338 | 221073_s_at | NOD1 | NM_006092 | caspase recruitment domain 4 |
| 339 | 221147_x_at | WWOX | NM_018560 | WW domain-containing oxidoreductase |
| 340 | 221266_s_at | LOC81501 | NM_030788 | DC-specific transmembrane protein |
| 341 | 221270_s_at | TGT | NM_031209 | tRNA-guanine transglycosylase |
| 342 | 221489_s_at | | AF227517 | sprouty (Drosophila) homolog 4 |
| 343 | 221577_x_at | | AF003934 | prostate differentiation factor |
| 344 | 221636_s_at | | AL136931 | DKFZp586G2122 |
| 345 | 221701_s_at | | AF352728 | STRA6 isoform 1 mRNA, alternatively spliced |
| 346 | 221724_s_at | | AF200738 | C-type lectin DDB27 short form |
| 347 | 221795_at | | AI346341 | Similar to hypothetical protein FLJ20093 |
| 348 | 221796_at | | AA707199 | Similar to hypothetical protein FLJ20093 |
| 349 | 221799_at | KIAA1402 | AB037823 | KIAA1402 protein |
| 350 | 221870_at | | AI417917 | FLJ22356 fis |
| 351 | 221900_at | | AI806793 | collagen, type VIII, alpha 2 |
| 352 | 221928_at | | AI057637 | Weakly sim to 2109260A B cell growth factor |
| 353 | 221959_at | | BE672313 | highly sim to HSU79298 Human clone 23803 |
| 354 | 32128_at | | Y13710 | alternative activated macrophage specific CC |
| | | | | chemokine 1 |
| 355 | 37004_at | SP-B | J02761 | pulmonary surfactant-associated protein B |
| 356 | 37117_at | | Z83838 | GTPase-activating protein sim to rhoGAP |
| | | | | protein. ribosomal protein L6 pseudogene |
| 357 | 37152_at | | L07592 | peroxisome proliferator activated receptor |
| 358 | 37408_at | KIAA0709 | AB014609 | KIAA0709 protein |
| 359 | 38691_s_at | SP5 | J03553 | pulmonary surfactant protein |
| 360 | 45297_at | | AI417917 | |
| 361 | 63305_at | | D81792 | |
| 362 | 823_at | | HSU84487 | CX3C chemokine precursor, alt spliced |
| 363 | 91920_at | | AI205180 | |
| 364 | | | | SGENE forward primer |
| 365 | | | | SGENE reverse primer |
| 366 | | | | SGENE probe |
| 367 | | | | TESTICAN1 forward primer |
| 368 | | | | TESTICAN1 reverse primer |
| 369 | | | | TESTICAN1 probe |
| 370 | | | | GABRE forward primer |
| 371 | | | | GABRE reverse primer |
| 372 | | | | GABRE probe |
| 373 | | | | CDH3 forward primer |
| 374 | | | | CDH3 reverse primer |
| 375 | | | | CDH3 probe |
| 376 | | | | FN1 forward primer |
| 377 | | | | FN1 reverse primer |
| 378 | | | | FN1 probe |
| 379 | | | | TPO-1 forward primer |
| 380 | | | | TPO-1 reverse primer |
| 381 | | | | TPO-1 probe |
| 382 | | | | TPO-2 forward primer |
| 383 | | | | TPO-2 reverse primer |
| 384 | | | | TPO-2 probe |
| 385 | | | | KCNAB1-1 forward primer |
| 386 | | | | KCNAB1-1 reverse primer |
| 387 | | | | KCNAB1-1 probe |
| 388 | | | | KCNAB1-2 forward primer |
| 389 | | | | KCNAB1-2 reverse primer |
| 390 | | | | KCNAB1-2 probe |
| 391 | | | | FABP4-1 forward primer |
| 392 | | | | FABP4-1 reverse primer |
| 393 | | | | FABP4-1 probe |
| 394 | | | | FABP4-2 forward primer |
| 395 | | | | FABP4-2 reverse primer |
| 396 | | | | FABP4-2 probe |
| 397 | | | | DOI1-1 forward primer |
| 398 | | | | DOI1-1 reverse primer |
| 399 | | | | DOI1-1 probe |
| 400 | | | | DOI1-2 forward primer |
| 401 | | | | DOI1-2 reverse primer |
| 402 | | | | DOI1-2 probe |
| 403 | | | | B-ACTIN forward primer |
| 404 | | | | B-ACTIN reverse primer |
| 405 | | | | B-ACTIN probe |
| 406 | | | | GOLGIN67 forward primer |
| 407 | | | | GOLGIN67 reverse primer |
| 408 | | | | GOLGIN67 probe |
| 409 | | | | PAX8 forward primer |
| 410 | | | | PAX8 reverse primer |
| 411 | | | | PAX8 probe |
| 412 | | | | HERC forward primer |
| 413 | | | | HERC reverse primer |
| 414 | | | | HERC probe |
| 415 | | | | DDIT3 forward primer |
| 416 | | | | DDIT3 reverse primer |
| 417 | | | | DDIT3 probe |
| 418 | | | | ITM1 forward primer |
| 419 | | | | ITM1 reverse primer |
| 420 | | | | ITM1 probe |
| 421 | | | | C1OF24 forward primer |
| 422 | | | | C1OF24 reverse primer |
| 423 | | | | C1OF24 probe |
| 424 | | | | MOT8 forward primer |
| 425 | | | | MOT8 reverse primer |
| 426 | | | | MOT8 probe |
| 427 | | | | ARG2 forward primer |
| 428 | | | | ARG2 reverse primer |
| 429 | | | | ARG2 probe |

1. A method of diagnosing thyroid cancer comprising the steps:
a. obtaining a biological sample from a patient; and
b. measuring the expression levels in the sample of genes selected from the group consisting of those encoding mRNA:
i. corresponding to SEQ ID NOs: 36, 53, 73, 211 and 242; and/or
ii. corresponding to SEQ ID NOs: 199, 207, 255 and 354; or
iii. recognized specifically by the probe sets selected from the group consisting of psids corresponding to SEQ ID NOs: 36, 53, 73, 211 and 242 as depicted in Table 25; and/or
iv. recognized specifically by the probe sets selected from the group consisting of psids corresponding to SEQ ID NOs: 199, 207, 255 and 354 as depicted in Table 25
wherein the gene expression levels above or below pre-determined cut-off levels are indicative of thyroid cancer.

2. A method of differentiating between thyroid carcinoma and benign thyroid diseases comprising the steps:
a. obtaining a sample from a patient; and
b. measuring the expression levels in the sample of genes selected from the group consisting of those encoding mRNA:
i. corresponding to SEQ ID NOs: 36, 53, 73, 211 and 242; and/or
ii. corresponding to SEQ ID NOs: 199, 207, 255 and 354; or
iii. recognized specifically by the probe sets selected from the group consisting of psids corresponding to SEQ ID NOs: 36, 53, 73, 211 and 242 as depicted in Table 25; and/or
iv. recognized specifically by the probe sets selected from the group consisting of psids corresponding to SEQ ID NOs: 199, 207, 255 and 354 as depicted in Table 25
wherein the gene expression levels above or below pre-determined cut-off levels are indicative of thyroid carcinoma.

3. A method of testing indeterminate thyroid fine needle aspirate (FNA) thyroid nodule samples comprising the steps:
a. obtaining a sample from a patient; and
b. measuring the expression levels in the sample of genes selected from the group consisting of those encoding mRNA:
i. corresponding to SEQ ID NOs: 36, 53, 73, 211 and 242; and/or
ii. corresponding to SEQ ID NOs: 199, 207, 255 and 354; or
iii. recognized specifically by the probe sets selected from the group consisting of psids corresponding to SEQ ID NOs: 36, 53, 73, 211 and 242 as depicted in Table 25; and/or
iv. recognized specifically by the probe sets selected from the group consisting of psids corresponding to SEQ ID NOs: 199, 207, 255 and 354 as depicted in Table 25
wherein the gene expression levels above or below pre-determined cut-off levels are indicative of thyroid cancer.

4. A method of determining thyroid cancer patient treatment protocol comprising the steps:
a. obtaining a biological sample from a thyroid cancer patient; and
b. measuring the expression levels in the sample of genes selected from the group consisting of those encoding mRNA:
i. corresponding to SEQ ID NOs: 36, 53, 73, 211 and 242; and/or
ii. corresponding to SEQ ID NOs: 199, 207, 255 and 354; or
iii. recognized specifically by the probe sets selected from the group consisting of psids corresponding to SEQ ID NOs: 36, 53, 73, 211 and 242 as depicted in Table 25; and/or
iv. recognized specifically by the probe sets selected from the group consisting of psids corresponding to SEQ ID NOs: 199, 207, 255 and 354 as depicted in Table 25
wherein the gene expression levels above or below pre-determined cut-off levels are sufficiently indicative of cancer to enable a physician to determine the type of surgery and/or therapy recommended to treat the disease.

5. A method of treating a thyroid cancer patient comprising the steps:
a. obtaining a biological sample from a thyroid cancer patient; and
b. measuring the expression levels in the sample of genes selected from the group consisting of those encoding mRNA:
i. corresponding to SEQ ID NOs: 36, 53, 73, 211 and 242; and/or
ii. corresponding to SEQ ID NOs: 199, 207, 255 and 354; or
iii. recognized specifically by the probe sets selected from the group consisting of psids corresponding to SEQ ID NOs: 36, 53, 73, 211 and 242 as depicted in Table 25; and/or
iv. recognized specifically by the probe sets selected from the group consisting of psids corresponding to SEQ ID NOs: 199, 207, 255 and 354 as depicted in Table 25
wherein the gene expression levels above or below pre-determined cut-off levels are indicative of cancer; and
c. treating the patient with thyroidectomy if they are cancer positive.

6. The method of one of claims 1-5 wherein the SEQ ID NOs. are 36, 53, 73, 211 and 242.

7. The method of one of claims 1-5 wherein the SEQ ID NOs. are 199, 207, 255 and 354.

8. The method of one of claims 1-5 wherein the SEQ ID NOs. are 45, 215, 65, 29, 190, 199, 207, 255 and 354.

9. The method of one of claims 1-5 wherein the sample is prepared by a method are selected from the group consisting of fine needle aspiration, bulk tissue preparation and laser capture microdissection.

10. The method of claim 9 wherein the bulk tissue preparation is obtained from a biopsy or a surgical specimen.

11. The method of one of claims 1-5 further comprising measuring the expression level of at least one gene encoding mRNA:
a. corresponding to SEQ ID NOs: 142, 219 and 309; and/or
b. corresponding to SEQ ID NOs: 9, 12 and 18; or
c. recognized specifically by the probe sets selected from the group consisting of psids corresponding to SEQ ID NOs: 130, 190 and 276 as depicted in Table 25; and/or
d. recognized specifically by the probe sets selected from the group consisting of psids corresponding to SEQ ID NOs: 9, 12 and 18 as depicted in Table 25.

12. The method of one of claims 1-5 further comprising measuring the expression level of at least one gene constitutively expressed in the sample.

13. The method of one of claims 1-5 wherein the specificity is at least about 40%.

14. The method of one of claims 1-5 wherein the specificity is at least about 50%.

15. The method of one of claims 1-5 wherein the specificity is at least about 60%.

16. The method of one of claims 1-5 wherein the sensitivity is at least at least about 90%.

17. The method of one of claims 1-5 wherein the sensitivity is at least at least about 92%.

18. The method of one of claims 1-5 wherein the comparison of expression patterns is conducted with pattern recognition methods.

19. The method of claim 18 wherein the pattern recognition methods include the use of a Cox proportional hazards analysis.

20. The method of one of claims 1-5 wherein the pre-determined cut-off levels are at least about 1.5-fold over- or under-expression in the sample relative to benign cells or normal tissue.

21. The method of one of claims 1-5 wherein the pre-determined cut-off levels have at least a statistically significant p-value over-expression in the sample having thyroid carcinoma cells relative to benign cells or normal tissue.

22. The method of claim 21 wherein the p-value is less than about 0.05.

23. The method of one of claims 1-5 wherein gene expression is measured on a microarray or gene chip.

24. The method of claim 23 wherein the microarray is a cDNA array or an oligonucleotide array.

25. The method of claim 24 wherein the microarray or gene chip further comprises one or more internal control reagents.

26. The method of one of claims 1-5 wherein gene expression is determined by nucleic acid amplification conducted by polymerase chain reaction (PCR) of RNA extracted from the sample.

27. The method of claim 26 wherein said PCR is reverse transcription polymerase chain reaction (RT-PCR).

28. The method of claim 27, wherein the RT-PCR further comprises one or more internal control reagents.

29. The method of claim 28, wherein the internal control reagent is a method of detecting PAX8 gene expression

30. The method of claim 29, wherein PAX8 gene expression is measured using SEQ ID NOs: 409-411.

31. The method of one of claims 1-5 wherein gene expression is detected by measuring or detecting a protein encoded by the gene.

32. The method of claim 31 wherein the protein is detected by an antibody specific to the protein.

33. The method of one of claims 1-5 wherein gene expression is detected by measuring a characteristic of the gene.

34. The method of claim 33 wherein the characteristic measured is selected from the group consisting of DNA amplification, methylation, mutation and allelic variation.

35. A method of cross validating a gene expression profile for thyroid carcinoma patients comprising the steps:
a. obtaining gene expression data from a statistically significant number of patient biological samples;
b. randomizing sample order;
c. setting aside data from about 10%-50% of samples;
d. computing, for the remaining samples, for factor of interest on all variables and selecting variables that meet a p-value cutoff (p);
e. selecting variables that fit a prediction model using a forward search and evaluating the training error until it hits a predetermined error rate;
f. testing the prediction model on the left-out 10-50% of samples;
g. repeating steps c., -g. with a new set of samples removed; and
h. continuing steps c)-g) until 100% of samples have been tested and record classification performance.

36. The method according to claim 35 wherein the gene expression data obtained in step h. is represented by genes selected from the group consisting of those encoding mRNA:
a. corresponding to SEQ ID NOs: 1, 4, 7, 8, 10-11, 13-17, 19-24, 26-27, 29-31, 33-35, 37-38, 40-52, 54-72, 75-82, 84-135, 138-141, 144-151, 153-159, 161-162, 164, 166-173, 176-198, 200-201, 203-206, 208-209, 212-213, 215-218, 220-221, 223, 227-233, 235-241, 243-244, 246-249, 251, 253-254, 256-263, 265-289, 291-293, 295-308, 310-331, 333-341, 343-345, 347-348, 350-353 and 355-363; or
b. recognized specifically by the probe sets selected from the group consisting of psids in Table 25 corresponding to SEQ ID NOs: 1, 4, 7, 8, 10-11, 13-17, 19-24, 26-27, 29-31, 33-35, 37-38, 40-52, 54-72, 75-82, 84-135, 138-141, 144-151, 153-159, 161-162, 164, 166-173, 176-198, 200-201, 203-206, 208-209, 212-213, 215-218, 220-221, 223, 227-233, 235-241, 243-244, 246-249, 251, 253-254, 256-263, 265-289, 291-293, 295-308, 310-331, 333-341, 343-345, 347-348, 350-353 and 355-363.

37. A method of independently validating a gene expression profile for thyroid carcinoma patients comprising the steps:
a. obtaining gene expression data from a statistically significant number of patient biological samples;
b. normalizing the source variabilities in the gene expression data;
c. computing for factor of interest on all variables that were selected previously; and
d. testing the prediction model on the sample and record classification performance.

38. The method according to claim 37 wherein the gene expression data obtained in step d. is represented by genes selected from the group consisting of those encoding mRNA:
a. corresponding to SEQ ID NOs: 1, 4, 7, 8, 10-11, 13-17, 19-24, 26-27, 29-31, 33-35, 37-38, 40-52, 54-72, 75-82, 84-135, 138-141, 144-151, 153-159, 161-162, 164, 166-173, 176-198, 200-201, 203-206, 208-209, 212-213, 215-218, 220-221, 223, 227-233, 235-241, 243-244, 246-249, 251, 253-254, 256-263, 265-289, 291-293, 295-308, 310-331, 333-341, 343-345, 347-348, 350-353 and 355-363; or
b. recognized specifically by the probe sets selected from the group consisting of psids in Table 25 corresponding to SEQ ID NOs: 1, 4, 7, 8, 10-11, 13-17, 19-24, 26-27, 29-31, 33-35, 37-38, 40-52, 54-72, 75-82, 84-135, 138-141, 144-151, 153-159, 161-162, 164, 166-173, 176-198, 200-201, 203-206, 208-209, 212-213, 215-218, 220-221, 223, 227-233, 235-241, 243-244, 246-249, 251, 253-254, 256-263, 265-289, 291-293, 295-308, 310-331, 333-341, 343-345, 347-348, 350-353 and 355-363.

39. A gene profile obtained by the method according to claim 37 or 38.

40. A method of generating a posterior probability score to enable diagnosis of thyroid carcinoma patients comprising the steps:
a. obtaining gene expression data from a statistically significant number of patient biological samples;
b. applying linear discrimination analysis to the data to obtain selected genes;
c. applying weighted expression levels to the selected genes with discriminate function factor to obtain a prediction model that can be applied as a posterior probability score.

41. The method according to claim 40, wherein the linear discriminant analysis is calculated using the equation:
$${p}_{( CP )} = \frac{{ⅇ}^{{d}_{( CP )} - {d}_{( CN )}}}{1 + {ⅇ}^{{d}_{( CP )} - {d}_{( CN )}}}$$
$${p}_{( CN )} = \frac{1}{1 + {ⅇ}^{{d}_{( CP )} - {d}_{( CN )}}}$$
where,
I_{(psid)}=The log base 2 intensity of the probe set enclosed in parenthesis.
d_{(CP)}=The discriminant function for the cancer positive class
d_{(CN)}=The discriminant function for the cancer negative class
P_{(CP)}=The posterior p-value for the cancer positive class
P_{(CN)}=The posterior p-value for the cancer negative class

42. A method of generating a thyroid carcinoma prognostic patient report comprising the steps:
a. obtaining a biological sample from the patient;
b. measuring gene expression of the sample;
c. applying a Relapse Hazard Score to the results of step b.; and
d. using the results obtained in step c. to generate the report.

43. The method of claim 42 wherein the report contains an assessment of patient outcome and/or probability of risk relative to the patient population.

44. A patient report generated by the method according to claim 42.

45. A composition comprising at least one probe set selected from the group consisting of: SEQ ID NOs: 36, 53, 73, 211 and 242; and/or SEQ ID NOs: 199, 207, 255 and 354; or the psids corresponding to SEQ ID NOs: 36, 53, 73, 211 and 242; and/or SEQ ID NOs: 199, 207, 255 and 354 as depicted in Table 25.

46. A kit for conducting an assay to determine thyroid carcinoma prognosis in a biological sample comprising: materials for detecting isolated nucleic acid sequences, their complements, or portions thereof of a combination of genes selected from the group consisting of those encoding mRNA:
a. corresponding to SEQ ID NOs: 36, 53, 73, 211 and 242; and/or
b. corresponding to SEQ ID NOs: 199, 207, 255 and 354; or
c. recognized specifically by the probe sets selected from the group consisting of psids corresponding to SEQ ID NOs: 36, 53, 73, 211 and 242 as depicted in Table 25; and/or
d. recognized specifically by the probe sets selected from the group consisting of psids corresponding to SEQ ID NOs: 199, 207, 255 and 354 as depicted in Table 25.

47. The kit of claim 46 wherein the SEQ ID NOs. are 36, 53, 73, 211 and 242.

48. The kit of claim 46 wherein the SEQ ID NOs. are 199, 207, 255 and 354.

49. The kit of claim 46 wherein the SEQ ID NOs. are 45, 215, 65, 29, 190, 199, 207, 255 and 354.

50. The kit of claim 46 further comprising reagents for conducting a microarray analysis.

51. The kit of claim 46 further comprising a medium through which said nucleic acid sequences, their complements, or portions thereof are assayed.

52. Articles for assessing thyroid carcinoma status comprising: materials for detecting isolated nucleic acid sequences, their complements, or portions thereof of a combination of genes selected from the group consisting of those encoding mRNA:
a. corresponding to SEQ ID NOs: 36, 53, 73, 211 and 242; and/or
b. corresponding to SEQ ID NOs: 199, 207, 255 and 354; or
c. recognized specifically by the probe sets selected from the group consisting of psids corresponding to SEQ ID NOs: 36, 53, 73, 211 and 242 as depicted in Table 25; and/or
d. recognized specifically by the probe sets selected from the group consisting of psids corresponding to SEQ ID NOs: 199, 207, 255 and 354 as depicted in Table 25.

53. The articles of claim 52 wherein the SEQ ID NOs. are 36, 53, 73, 211 and 242.

54. The articles of claim 52 wherein the SEQ ID NOs. are 199, 207, 255 and 354.

55. The articles of claim 52 wherein the SEQ ID NOs. are 45, 215, 65, 29, 190, 199, 207, 255 and 354.

56. The articles of claim 52 further comprising reagents for conducting a microarray analysis.

57. The articles of claim 52 further comprising a medium through which said nucleic acid sequences, their complements, or portions thereof are assayed.

58. A microarray or gene chip for performing the method of one of claims 1-5.

59. The microarray of claim 58 comprising isolated nucleic acid sequences, their complements, or portions thereof of a combination of genes selected from the group consisting of those encoding mRNA:
a. corresponding to SEQ ID NOs: 36, 53, 73, 211 and 242; and/or
b. corresponding to SEQ ID NOs: 199, 207, 255 and 354; or
c. recognized specifically by the probe sets selected from the group consisting of psids corresponding to SEQ ID NOs: 36, 53, 73, 211 and 242 as depicted in Table 25; and/or
d. recognized specifically by the probe sets selected from the group consisting of psids corresponding to SEQ ID NOs: 199, 207, 255 and 354 as depicted in Table 25
where the combination is sufficient to characterize thyroid carcinoma or risk of relapse in a biological sample.

60. The microarray of claim 59 wherein the measurement or characterization is at least about 1.5-fold over- or under-expression.

61. The microarray of claim 59 wherein the measurement provides a statistically significant p-value over- or under-expression.

62. The microarray of claim 59 wherein the p-value is less than about 0.05.

63. The microarray of claim 59 comprising a cDNA array or an oligonucleotide array.

64. The microarray of claim 59 further comprising or more internal control reagents.

65. A diagnostic/prognostic portfolio comprising isolated nucleic acid sequences, their complements, or portions thereof of a combination of genes selected from the group consisting of those encoding mRNA:
a. corresponding to SEQ ID NOs: 36, 53, 73, 211 and 242; and/or
b. corresponding to SEQ ID NOs: 199, 207, 255 and 354; or
c. recognized specifically by the probe sets selected from the group consisting of psids corresponding to SEQ ID NOs: 36, 53, 73, 211 and 242 as depicted in Table 25; and/or
d. recognized specifically by the probe sets selected from the group consisting of psids corresponding to SEQ ID NOs: 199, 207, 255 and 354 as depicted in Table 25
where the combination is sufficient to characterize thyroid carcinoma status or risk of relapse in a biological sample.

66. The portfolio of claim 65 wherein the measurement or characterization is at least about 1.5-fold over- or under-expression.

67. The portfolio of claim 65 wherein the measurement provides a statistically significant p-value over- or under-expression.

68. The portfolio of claim 65 wherein the p-value is less than about 0.05.

The application's sequence listing, which the Patent Office published only in electronic form, follows.

SEQUENCE LISTING (429 sequences)

SEQ ID NO: 1 - DNA, 607 bp, human
  misc_feature (550)..(550): n is a, c, g, or t
tttctcagtctacctcacttaatgtattaaaaaggaggctttgccccaaccccaccccatgagaagaagcatgagaaatgcgggagcgcaacagagagcttgaagcgggctccaggtgggtctggtggacagaagggccacagtgcctgcctgctgggccatccacttgcccagggatgttctaggctctctgattggtgtggcaacgttcctgaaacgctgtgatccccgtgggctgtgctctgccagtgacagcatctgcgtaggagggctggacgatggtcggtatggctcaaaggagctgggtcccctccggagccccacggcgggggtggcggaggagaggggagcggtagttacgttgcatagtggtcaaagctgccgaggtactccagggccgcacggtagcacagctgatactggtcctctgtctgcaccatggcaggacgctgtgtacgcagggtcttcacggtctgaaacatgtcgaccacgccctcatagcgcatgcgctccaggacgatgctcagagtgatgaacaccccggtgcggnccacgccagcactgcagtgcaccgtgataggcccatcctgtccaaactgctccttgg

SEQ ID NO: 2 - DNA, 7923 bp, human
gcgcactcgggcacgcgctcggaagtcgggggtcggcgcggagtgcaggctgctcccggggtaggtgagggaagcgcggaggcggggcgcgggggcagtggtcggcgagcagcgcggtcctcgctaggggcgcccacccgtcagtctctccggcgcgagccgccgccaccgcccgcgccggagtcaggcccctgggcccccaggctcaagcagcgaagcggcctccgggggacgccgctaggcgagaggaacgcgccggtgcccttgccttcgccgtgacccagcgtgcgggcggcgggatgagagggagccatcgggccgcgccggccctgcggccccgggggcggctctggcccgtgctggccgtgctggcggcggccgccgcggcgggctgtgcccaggcagccatggacgagtgcacggacgagggcgggcggccgcagcgctgcatgcccgagttcgtcaacgccgctttcaacgtgactgtggtggccaccaacacgtgtgggactccgcccgaggaatactgtgtgcagaccggggtgaccggggtcaccaagtcctgtcacctgtgcgacgccgggcagccccacctgcagcacggggcagccttcctgaccgactacaacaaccaggccgacaccacctggtggcaaagccagaccatgctggccggggtgcagtaccccagctccatcaacctcacgctgcacctgggaaaagcttttgacatcacctatgtgcgtctcaagttccacaccagccgcccggagagctttgccatttacaagcgcacacgggaagacgggccctggattccttaccagtactacagtggttcctgcgagaacacctactccaaggcaaaccgcggcttcatcaggacaggaggggacgagcagcaggccttgtgtactgatgaattcagtgacatttctcccctcactgggggcaacgtggccttttctaccctggaaggaaggcccagcgcctataactttgacaatagccctgtgctgcaggaatgggtaactgccactgacatcagagtaactcttaatcgcctgaacacttttggagatgaagtgtttaacgatcccaaagttctcaagtcctattattatgccatctctgattttgctgtaggtggcagatgtaaatgtaatggacacgcaagcgagtgtatgaagaacgaatttgataagctggtgtgtaattgcaaacataacacatatggagtagactgtgaaaagtgtcttcctttcttcaatgaccggccgtggaggagggcaactgcggaaagtgccagtgaatgcctgccctgtgattgcaatggtcgatcccaggaatgctacttcgaccctgaactctatcgttccactggccatgggggccactgtaccaactgccaggataacacagatggcgcccactgtgagaggtgccgagagaacttcttccgccttggcaacaatgaagcctgctcttcatgccactgtagtcctgtgggctctctaagcacacagtgtgatagttacggcagatgcagctgtaagccaggagtgatgggggacaaatgtgaccgttgccagcctggattccattctctcactgaagcaggatgcaggccatgctcttgtgatccctctggcagcatagatgaatgtaatgttgaaacaggaagatgtgtttgcaaagacaatgtcgaaggcttcaattgtgaaagatgcaaacctggattttttaatctggaatcatctaatcctcggggttgcacaccctgcttctgctttgggcattcttctgtctgtacaaacgctgttggctacagtgtttattctatctcctctacctttcagattgatgaggatgggtggcgtgcggaacagagagatggctctgaagcatctctcgagtggtcctctgagaggcaagatatcgccgtgatctcagacagctactttcctcggtacttcattgctcctgcaaagttcttgggcaagcaggtgttgagttatggtcagaacctctccttctcctttcgagtggacaggcgagatactcgcctctctgccgaagaccttgtgcttgagggagctggcttaagagtatctgtacccttgatcgctcagggcaattcctatccaagtgagaccactgtgaagtatgtcttcaggctccatgaagcaacagattacccttggaggcctgctcttaccccttttgaatttcagaagctcctaaacaacttgacctctatcaagatacgtgggacatacagtgagagaagtgctggatatttggatgatgtcaccctggcaagtgctcgtcctgggcctggagtccctgcaacttgggtggagtcctgcacctgtcctgtgggatatggagggcagttttgtgagatgtgcctctcaggttacagaagagaaactcctaatcttggaccatacagtccatgtgtgctttgcgcctgcaatggacacagcgagacctgtgatcctgagacaggtgtttgtaactgcagagacaatacggctggcccgcactgtgagaagtgcagtgatgggtactatggagattcaactgcaggcacctcctccgattgccaaccctgtccgtgtcctggaggttcaagttgtgctgttgttcccaagacaaaggaggtggtgtgcaccaactgtcctactggcaccactggtaagagatgtgagctctgtgatgatggctactttggagaccccctgggtagaaacggccctgtgagactttgccgcctgtgccagtgcagtgacaacatcgatcccaacgcagttggaaattgcaatcgcttgacgggagaatgcctgaagtgcatctataacactgctggcttctattgtgaccggtgcaaagacggattttttggaaatcccctggctcccaatccagcagacaaatgcaaagcctgcaattgcaatccgtatgggaccatgaagcagcagagcagctgtaaccccgtgacggggcagtgtgaatgtttgcctcacgtgactggccaggactgtggtgcttgtgaccctggattctacaatctgcagagtgggcaaggctgtgagaggtgtgactgccatgccttgggctccaccaatgggcagtgtgacatccgcaccggccagtgtgagtgccagcccggcatcactggtcagcactgtgagcgctgtgaggtcaaccactttgggtttggacctgaaggctgcaaaccctgtgactgtcatcctgagggatctctttcacttcagtgcaaagatgatggtcgctgtgaatgcagagaaggctttgtgggaaatcgctgtgaccagtgtgaagaaaactatttctacaatcggtcttggcctggctgccaggaatgtccagcttgttaccggctggtaaaggataaggttgctgatcatagagtgaagctccaggaattagagagtctcatagcaaaccttggaactggggatgagatggtgacagatcaagccttcgaggatagactaaaggaagcagagagggaagttatggacctccttcgtgaggcccaggatgtcaaagatgttgaccagaatttgatggatcgcctacagagagtgaataacactctgtccagccaaattagccgtttacagaatatccggaataccattgaagagactggaaacttggctgaacaagcgcgtgcccatgtagagaacacagagcggttgattgaaatcgcatccagagaacttgagaaagcaaaagtcgctgctgccaatgtgtcagtcactcagccagaatctacaggggacccaaacaacatgactcttttggcagaagaggctcgaaagcttgctgaacgtcataaacaggaagctgatgacattgttcgagtggcaaagacagccaatgatacgtcaactgaggcatacaacctgcttctgaggacactggcaggagaaaatcaaacagcatttgagattgaagagcttaataggaagtatgaacaagcgaagaacatctcacaggatctggaaaaacaagctgcccgagtacatgaggaggccaaaagggccggtgacaaagctgtggagatctatgccagcgtggctcagctgagccctttggactctgagacactggagaatgaagcaaataacataaagatggaagctgagaatctggaacaactgattgaccagaaattaaaagattatgaggacctcagagaagatatgagagggaaggaacttgaagtcaagaaccttctggagaaaggcaagactgaacagcagaccgcagaccaactcctagcccgagctgatgctgccaaggccctcgctgaagaagctgcaaagaagggacgggataccttacaagaagctaatgacattctcaacaacctgaaagattttgataggcgcgtgaacgataacaagacggccgcagaggaggcactaaggaagattcctgccatcaaccagaccatcactgaagccaatgaaaagaccagagaagcccagcaggccctgggcagtgctgcggcggatgccacagaggccaagaacaaggcccatgaggcggagaggatcgcaagcgctgtccaaaagaatgccaccagcaccaaggcagaagctgaaagaacttttgcagaagttacagatctggataatgaggtgaacaatatgttgaagcaactgcaggaagcagaaaaagagctaaagagaaaacaagatgacgctgaccaggacatgatgatggcagggatggcttcacaggctgctcaagaagccgagatcaatgccagaaaagccaaaaactctgttactagcctcctcagcattattaatgacctcttggagcagctggggcagctggatacagtggacctgaataagctaaacgagattgaaggcaccctaaacaaagccaaagatgaaatgaaggtcagcgatcttgataggaaagtgtctgacctggagaatgaagccaagaagcaggaggctgccatcatggactataaccgagatatcgaggagatcatgaaggacattcgcaatctggaggacatcaggaagaccttaccatctggctgcttcaacaccccgtccattgaaaagccctagtgtctttagggctggaaggcagcatccctctgacaggggggcagttgtgaggccacagagtgccttgacacaaagattacatttttcagacccccactcctctgctgctgtccatcactgtccttttgaaccaggaaaagtcacagagtttaaagagaagcaaattaaacatcctgaatcgggaacaaagggttttatctaataaagtgtctcttccatcacgttgctaccttacccacacttccctctgatttgcgtgaggacgtggcatcctacttacgtacgtggcataacacatcgtgtgagcccatgtatgctggggtagagcaagtagccctcccctgtctcatcgatccagcagaacctcctcagtctcagtactcttgtttctataaggaaaagttttgctactaacagtagcattgtgatggccagtatatccagtccatggataaagaaaatgcatctgcatctcctgcccctcttccttctaagcaaaaggaaataaacatcctgtgccaaaggtattggtcatttagaatgtcggtagccatccatcagtgcttttagctattatgagtgtaggacactgagccatccgtgggtcaggatgcaattatttataaaagtccccaggtgaacatggctgaagatttttctagtatattaataattgactaggaagatgaactttttttcagatctttgggcagctgataatttaaatctggatgggcagcttgcactcaccaatagaccaaaagacatcttttgatattcttataaatggaacttacacagaagaaatagggatatgataaccactaaagttttgttttcaaaatcaaactaattcttacagcttttttattagttagtcttggaactagtgttaagtatctggcagagaacagttaatccctaaggtcttgacaaaacagaagaaaaacaagcctcctcgtcctagtcttttctagcaaagggataaaacttagatggcagcttgtactgtcagaatcccgtgtatccatttgttcttctgttggagagatgagacatttgacccttagctccagttttcttctgatgtttccatcttccagaatccctcaaaaaacattgtttgccaaatcctggtggcaaatacttgcactcagtatttcacacagctgccaacgctatcgagttcctgcactttgtgatttaaatccactctaaaccttccctctaagtgtagagggaagacccttacgtggagtttcctagtgggcttctcaacttttgatcctcagctctgtggttttaagaccacagtgtgacagttccctgccacacacccccttcctcctaccaacccacctttgagattcatatatagcctttaacactatgcaactttgtactttgcgtagcaggggctggggtggggggaaagaaacctattatcatggacacactggtgctattaattatttcaaatttatatttttgtgtgaatgttttgtgttttgtttatccatgctatagaacaaggaatttatgtagatatacttagtcctatttctagaatgacactctgttcactttgctcaatttttcctcttcactggcacaagtatctgaatacctccttccctcccttctagagttctttggattgtactccaaagaattgtgccttgtgtttgcagcatctccattctctaaattaatataattgctttcctccacacccagccacgtaaagaggtaacttgggtcctcttccattgcagtcctgatgatcctaacctgcagcacggtggttttacaatgttccagagcaggaacgccaggttgacaagctatggtaggattaggaaagtttgctgaagaggatctttgacgccacagtgggactagccaggaatgagggagaaatgccctttttggcaattgttggagctggataggtaagttttataagggagtacattttgactgagcacttagggcatcaggaacagtgctacttactggtgggtagactgggagaggtggtgtaacttagttcttgatgatcccacttcctgtttccatctgcttgggatataccagagtttaccacaagtgttttgacgatatactcctgagctttcactctgctggcttctcccaggcctcttctactatggcaggagatgtggtgtgctgttgcaaagttttcacgtcatcgtttcctggctagttcatttcattaagtggctacatcctaacatatgcattggtcaaggttgcagcaagaggactgaagattgactgccaagctagtttgggtgaagttcactccagcaagtctcaggccacaatggggtggtttggtttggtttccttttaactttctttttgttatttgcttttctcctccacctgtgtggtatattttttaagcagaattttattttttaaaataaaaggttctttacaagatgataccttaattacactcccgcaacacagccattattttattgtctagctccagttatctgtattttatgtaatgtaattgacaggatggctgctgcagaatgctggttgacacagggattattatactgctatttttccctgaattcttttccttggaattccaactgtggaccttttatatgtgccttcactttagctgtttgccttactctacagccttgctctccggggtggttaataaaatgcaacacttggcatttttatgttataagaaaaacagtattttatttataataaaatctgaatattttgtaacccttta

SEQ ID NO: 3 - DNA, 3069 bp, human
tgtttccgctgcatccagacttcctcaggcggtggctggaggctgcgcatctggggctttaaacatacaaagggattgccaggacctgcggcggcggcggcggcggcgggggctggggcgcgggggccggaccatgagccgctgagccgggcaaaccccaggccaccgagccagcggaccctcggagcgcagccctgcgccgcggaccaggctccaaccaggcggcgaggcggccacacgcaccgagccagcgacccccgggcgacgcgcggggccagggagcgctacgatggaggcgctaatggcccggggcgcgctcacgggtcccctgagggcgctctgtctcctgggctgcctgctgagccacgccgccgccgcgccgtcgcccatcatcaagttccccggcgatgtcgcccccaaaacggacaaagagttggcagtgcaatacctgaacaccttctatggctgccccaaggagagctgcaacctgtttgtgctgaaggacacactaaagaagatgcagaagttctttggactgccccagacaggtgatcttgaccagaataccatcgagaccatgcggaagccacgctgcggcaacccagatgtggccaactacaacttcttccctcgcaagcccaagtgggacaagaaccagatcacatacaggatcattggctacacacctgatctggacccagagacagtggatgatgcctttgctcgtgccttccaagtctggagcgatgtgaccccactgcggttttctcgaatccatgatggagaggcagacatcatgatcaactttggccgctgggagcatggcgatggatacccctttgacggtaaggacggactcctggctcatgccttcgccccaggcactggtgttgggggagactcccattttgatgacgatgagctatggaccttgggagaaggccaagtggtccgtgtgaagtatggcaacgccgatggggagtactgcaagttccccttcttgttcaatggcaaggagtacaacagctgcactgatactggccgcagcgatggcttcctctggtgctccaccacctacaactttgagaaggatggcaagtacggcttctgtccccatgaagccctgttcaccatgggcggcaacgctgaaggacagccctgcaagtttccattccgcttccagggcacatcctatgacagctgcaccactgagggccgcacggatggctaccgctggtgcggcaccactgaggactacgaccgcgacaagaagtatggcttctgccctgagaccgccatgtccactgttggtgggaactcagaaggtgccccctgtgtcttccccttcactttcctgggcaacaaatatgagagctgcaccagcgccggccgcagtgacggaaagatgtggtgtgcgaccacagccaactacgatgacgaccgcaagtggggcttctgccctgaccaagggtacagcctgttcctcgtggcagcccacgagtttggccacgccatggggctggagcactcccaagaccctggggccctgatggcacccatttacacctacaccaagaacttccgtctgtcccaggatgacatcaagggcattcaggagctctatggggcctctcctgacattgaccttggcaccggccccacccccacactgggccctgtcactcctgagatctgcaaacaggacattgtatttgatggcatcgctcagatccgtggtgagatcttcttcttcaaggaccggttcatttggcggactgtgacgccacgtgacaagcccatggggcccctgctggtggccacattctggcctgagctcccggaaaagattgatgcggtatacgaggccccacaggaggagaaggctgtgttctttgcagggaatgaatactggatctactcagccagcaccctggagcgagggtaccccaagccactgaccagcctgggactgccccctgatgtccagcgagtggatgccgcctttaactggagcaaaaacaagaagacatacatctttgctggagacaaattctggagatacaatgaggtgaagaagaaaatggatcctggctttcccaagctcatcgcagatgcctggaatgccatccccgataacctggatgccgtcgtggacctgcagggcggcggtcacagctacttcttcaagggtgcctattacctgaagctggagaaccaaagtctgaagagcgtgaagtttggaagcatcaaatccgactggctaggctgctgagctggccctggctcccacaggcccttcctctccactgccttcgatacaccgggcctggagaactagagaaggacccggaggggcctggcagccgtgccttcagctctacagctaatcagcattctcactcctacctggtaatttaagattccagagagtggctcctcccggtgcccaagaatagatgctgactgtactcctcccaggcgccccttccccctccaatcccaccaaccctcagagccacccctaaagagatcctttgatattttcaacgcagccctgctttgggctgccctggtgctgccacacttcaggctcttctcctttcacaaccttctgtggctcacagaacccttggagccaatggagactgtctcaagagggcactggtggcccgacagcctggcacagggcagtgggacagggcatggccaggtggccactccagacccctggcttttcactgctggctgccttagaacctttcttacattagcagtttgctttgtatgcactttgtttttttctttgggtcttgttttttttttccacttagaaattgcatttcctgacagaaggactcaggttgtctgaagtcactgcacagtgcatctcagcccacatagtgatggttcccctgttcactctacttagcatgtccctaccgagtctcttctccactggatggaggaaaaccaagccgtggcttcccgctcagccctccctgcccctcccttcaaccattccccatgggaaatgtcaacaagtatgaataaagacacctactgagtggc

SEQ ID NO: 4 - DNA, 2443 bp, human
aaatggcgtgcccgtctctccgccggccccctgcctcgcagtggtttctcctgcagctcccctgggctccgcggccagtagtgcagcccgtggagccgcggctttgcccgtctcctctgggtggccccagtgcgcgggctgacactcattcagccggggaaggtgaggcgagtagaggctggtgcggaacttgccgcccccagcagcgccggcgggctaagcccagggccgggcagacaaaagaggccgcccgcgtaggaaggcacggccggcggcggcggagcgcagcgatggccgggcgagggggcagcgcgctgctggctctgtgcggggcactggctgcctgcgggtggctcctgggcgccgaagcccaggagcccggggcgcccgcggcgggcatgaggcggcgccggcggctgcagcaagaggacggcatctccttcgagtaccaccgctaccccgagctgcgcgaggcgctcgtgtccgtgtggctgcagtgcaccgccatcagcaggatttacacggtggggcgcagcttcgagggccgggagctcctggtcatcgagctgtccgacaaccctggcgtccatgagcctggtgagcctgaatttaaatacattgggaatatgcatgggaatgaggctgttggacgagaactgctcattttcttggcccagtacctatgcaacgaataccagaaggggaacgagacaattgtcaacctgatccacagtacccgcattcacatcatgccttccctgaacccagatggctttgagaaggcagcgtctcagcctggtgaactcaaggactggtttgtgggtcgaagcaatgcccagggaatagatctgaaccggaactttccagacctggataggatagtgtacgtgaatgagaaagaaggtggtccaaataatcatctgttgaaaaatatgaagaaaattgtggatcaaaacacaaagcttgctcctgagaccaaggctgtcattcattggattatggatattccttttgtgctttctgccaatctccatggaggagaccttgtggccaattatccatatgatgagacgcggagtggtagtgctcacgaatacagctcctccccagatgacgccattttccaaagcttggcccgggcatactcttctttcaacccggccatgtctgaccccaatcggccaccatgtcgcaagaatgatgatgacagcagctttgtagatggaaccaccaacggtggtgcttggtacagcgtacctggagggatgcaagacttcaattaccttagcagcaactgttttgagatcaccgtggagcttagctgtgagaagttcccacctgaagagactctgaagacctactgggaggataacaaaaactccctcattagctaccttgagcagatacaccgaggagttaaaggatttgtccgagaccttcaaggtaacccaattgcgaatgccaccatctccgtggaaggaatagaccacgatgttacatccgcaaaggatggtgattactggagattgcttatacctggaaactataaacttacagcctcagctccaggctatctggcaataacaaagaaagtggcagttccttacagccctgctgctggggttgattttgaactggagtcattttctgaaaggaaagaagaggagaaggaagaattgatggaatggtggaaaatgatgtcagaaactttaaatttttaaaaaggcttctagttagctgctttaaatctatctatataatgtagtatgatgtaatgtggtcttttttttagattttgtgcagttaatacttaacattgatttattttttaatcatttaaatattaatcaactttccttaaaataaatagcctcttaggtaaaaatataagaacttgatatatttcattctcttatatagtattcattttcctacctatattacacaaaaaagtatagaaaagatttaagtaattttgccatcctaggcttaaatgcaatattcctggtattatttacaatgcagaattttttgagtaattctagctttcaaaaattagtgaagttcttttactgtaattggtgacaatgtcacataatgaatgctattgaaaaggttaacagatacagctcggagttgtgagcactctactgcaagacttaaatagttcagtataaattgtcgtttttttcttgtgctgactaactataagcatgatcttgttaatgcatttttgatgggaagaaaaggtacatgtttacaaagaggttttatgaaaagaataaaaattgacttcttgcttgtacatataggagcaatactattatattatgtagtccgttaacactacttaaaagtttagggttttctcttggttgtagagtggcccagaattgcattctgaatgaataaaggttaaaaaaaaatccccagtgaaaaaaaa

SEQ ID NO: 5 - DNA, 5483 bp, human
  misc_feature (399)..(399): n is a, c, g, or t
  misc_feature (401)..(401): n is a, c, g, or t
  misc_feature (656)..(656): n is a, c, g, or t
tctgtcgacttgccccagagctgatccttgtctttgtccacttctcagcgaggatggcacttcagggagcccttcccttactatcgcagagagagcaggccctccccagtcatgtccaacccagaactctgttttgttttcttcatagccctagcatcacagaaaatcaccctgtgcattcatggatgtccacgggggcaagggctttgtgttgcttaacccagcatcctgaaccgtgtttgttgaatgaatacagaaccccgtttgctctgggagagcacagaaaacagtcttctatcatatatcatagccagctcgaaacagcagatggcttccatatccagagagcaagaaccagagagagagagaaagagagagagtttgggtctttctcctctntncctgctctctccagagaaactggaggggtagcagttagcattcccccgctggttccaccaagcacagtcaaggtctctaggacatggccacccctcacctgtggaagcggtcctgctggggtgggtgggtgttagttggttctggtttgggtcagagacacccagtggcccaggtgggcgtggggccagggcgcagacgagaaggggcacgagggctccgctccgaggacccagcggcaagcaccggtcccgggngggccccagcccacccactcgcgtgcccacggcggcattattccctataaggatctgaacgatccgggggcggccccgccccgttaccccttgcccccggccccgccccctttttggagggccgatgaggtaatgcggctctgccattggtctgagggggcgggccccaacagcccgaggcggggtccccgggggcccagcgctatatcactcggccgcccaggcagacggcgcagagcgggcagcaggcaggcggcgggcgctcagacggcttctcctcctcctcttgctcctccagctcctgctccttcgccgggaggccgcccgccgagtcctggccagcgccgaggcagcctgcctgcgccccatcccgtcccgccgggcactcggagggcagcgcgccggaggccaaggttgccccgcacggcccggcgggcgagcgagctcgggctgcagcagccccgccggcgcgcacggcaactttggagaggcgagcagcagccccggcagcggcggcagcagcggcaatgaccccttggctcgggctcatcgtgctcctgggcagctggagcctgggggactggggcgccgaggcgtgcacatgctcgcccagccacccccaggacgccttctgcaactccgacatcgtgatccgggccaaggtggtggggaagaagctggtaaaggaggggcccttcggcacgctggtctacaccatcaagcagatgaagatgtaccgaggcttcaccaagatgccccatgtgcagtacatccacacggaagcttccgagagtctctgtggccttaagctggaggtcaacaagtaccagtacctgctgacaggtcgcgtctatgatggcaagatgtacacggggctgtgcaacttcgtggagaggtgggaccagctcaccctctcccagcgcaaggggctgaactatcggtatcacctgggttgtaactgcaagatcaagtcctgctactacctgccttgctttgtgacttccaagaacgagtgtctctggaccgacatgctctccaatttcggttaccctggctaccagtccaaacactacgcctgcatccggcagaagggcggctactgcagctggtaccgaggatgggcccccccggataaaagcatcatcaatgccacagacccctgagcgccagaccctgccccacctcacttccctcccttcccgctgagcttcccttggacactaactcttcccagatgatgacaatgaaattagtgcctgttttcttgcaaatttagcacttggaacatttaaagaaaggtctatgctgtcatatggggtttattgggaactatcctcctggccccaccctgccccttctttttggttttgacatcattcatttccacctgggaatttctggtgccatgccagaaagaatgaggaacctgtattcctcttcttcgtgataatataatctctatttttttaggaaaacaaaaatgaaaaactactccatttgaggattgtaattcccacccctcttgcttcttccccacctcaccatctcccagaccctcttccctttgcccttctcctccaatacataaaggacacagacaaggaacttgctgaaaggccaaccatttcaggatcagtcaaaggcagcaagcagatagactcaaggtgtgtgaaagatgttatacaccaggagctgccactgcatgtcccaaccagactgtgtctgtctgtgtctgcatgtaagagtgagggagggaaggaaggaactacaagagagtcggagatgatgcagcacacacacaattccccagcccagtgatgcttgtgttgaccagatgttcctgagtctggagcaagcacccaggccagaataacagagctttcttagttggtgaagacttaaacatctgcctgaggtcaggaggcaatttgcctgccttgtacaaaagctcaggtgaaagactgagatgaatgtctttcctctccctgcctcccaccagacttcctcctggaaaacgctttggtagatttggccaggagctttcttttatgtaaattggataaatacacacaccatacactatccacagatatagccaagtagatttgggtagaggatactatttccagaatagtgtttagctcacctagggggatatgtttgtatacacatttgcatatacccacatggggacataagctaatttttttacaggacacagaattctgttcaatgctgttaaatatgccaatagtttaatctcttctattttgttgtcgttgcttgtttgaagaaaatcatgacattccaagttgacattttttttttcattttaattaaaatttgaaattctgaacaccgtcagcaccctctcttccctatcatgggtcatctgacccctgtccgtctccttgtccctgcttcatgtttgggggcctttctttaactgccttcctggcttagctcagatggcagatgagagtgtagtcaagggcctgggcacaggagggagagctgcagagtgtcctgcctgccttggctggagggacacctctcctgggtgtggagacagcttggttccctttccctagctccctggtgggtgaatgccacctcctgagatcctcacctcttggaattaaaattgttggtcactggggaaagcctgagtttgcaaccagttgtagggtttctgttgtgttttttttttttttgaaataaaactataatataaattctcctattaaataaaattattttaagttttagtgtcaaaagtgagatgctgagagtaggtgataatgtatattttacagagtgggggttggcaggatggtgacattgaacatgattgctctctgtctcttttttcagcttatgggtatttatcttctattagtatttgtatcttcagttcattccactttaggaaacagagctgccaattgaaacagaagaagaaaaaaaaaaaagcagcagacaacacactgtagagtcttgcacacacacaagtgcccaggcaaggtgcttggcagaaccgcagagtgggaagagagtaccggcatcgggtttccttgggatcaatttcattaccgtgtacctttcccattgtggtcacgccatttggcagggggagaatgggaggcttggccttctttgtgaggcagtgtgagcagaagaagctgatgccagcatgtcactggttttgaagggatgagcccagacttgatgttttgggattgtccttattttaacctcaaggtctcgcatggtggggcccctgaccaacctacacaagttccctcccacaagtggacatcagtgtcttctctgtgaggcatctggccattcgcactccctggtgtggtcagcctctctcacacaaggaggaacttgggtgaaggctgagtgtgaggcacctgaagtttccctgcggagtcgataaattagcagaaccacatccccatctgttaggccttggtgaggaggccctgggcaaagaagggtctttcgcaaagcgatgtcagagggcggttttgagctttctataagctatagctttgtttatttcacccgttcacttactgtataatttaaaatcatttatgtagctgagacacttctgtatttcaatcatatcatgaacattttattttgctaaatcttgtgtcatgtgtaggctgtaatatgtgtacattgtgtttaagagaaaaatgaaacccacatgccgccattttcctgaatcaaattctgcagtggaatggagaggaaaatacttctaggcaagcagctagactggtgaattgggggaaatagaaggaactagtaactgagactcctccagcctcttccctattggaatcccaatggctcctggagtaggaaaaaagtttaaactacattcatgttcttgttctgtgtcactcggccctgggtagtctaccatttacttcaccccaagtcctgctgcccatccagttgggaagcccatgattttcctaagaatccagggccataggagatacaattccaagttctcgcttcctcctttgggcatctcttctgcctcccaatcaaggaagctccacgctcaggctctcagctctcgggccagtgctctgctctgtccagggtaggtaatactgggagactcctgtcttttaccctcccctcgttccagacctgcctcatggtggcaacatggttcttgaacaattaaagaaacaaatgactttttggaatagccctgtctagggcaaactgtggcccccaggagacactacccttccatgccccagacctctgtcttgcatgtgacaattgacaatctggactaccccaagatggcacccaagtgtttggcttctggctacctaaggttaacatgtcactagagtatttttatgagagacaaacattataaaaatctgatggcaaaagcaaaacaaaatggaaagtaggggaggtggatgtgacaacaacttccaaattggctctttggaggcgagaggaaggggagaacttggagaatagtttttgctttgggggtagaggcttcttagattctcccagcatccgcctttccctttagccagtctgctgtcctgaaacccagaagtgatggagagaaaccaacaagagatctcgaaccctgtctagaaggaatgtatttgttgctaaatttcgtagcactgtttacagttttcctccatgttatttatgaattttatattccgtgaatgtatattgtcttgtaatgttgcataatgttcactttttatagtgtgtcctttattctaaacagtaaagtggttttatttctatcac

SEQ ID NO: 6 - DNA, 2036 bp, human
ccggccctcgccctgtccgccgccaccgccgccgccgccagagtcgccatgcagatcccgcgcgccgctcttctcccgctgctgctgctgctgctggcggcgcccgcctcggcgcagctgtcccgggccggccgctcggcgcctttggccgccgggtgcccagaccgctgcgagccggcgcgctgcccgccgcagccggagcactgcgagggcggccgggcccgggacgcgtgcggctgctgcgaggtgtgcggcgcgcccgagggcgccgcgtgcggcctgcaggagggcccgtgcggcgaggggctgcagtgcgtggtgcccttcggggtgccagcctcggccacggtgcggcggcgcgcgcaggccggcctctgtgtgtgcgccagcagcgagccggtgtgcggcagcgacgccaacacctacgccaacctgtgccagctgcgcgccgccagccgccgctccgagaggctgcaccggccgccggtcatcgtcctgcagcgcggagcctgcggccaagggcaggaagatcccaacagtttgcgccataaatataactttatcgcggacgtggtggagaagatcgcccctgccgtggttcatatcgaattgtttcgcaagcttccgttttctaaacgagaggtgccggtggctagtgggtctgggtttattgtgtcggaagatggactgatcgtgacaaatgcccacgtggtgaccaacaagcaccgggtcaaagttgagctgaagaacggtgccacttacgaagccaaaatcaaggatgtggatgagaaagcagacatcgcactcatcaaaattgaccaccagggcaagctgcctgtcctgctgcttggccgctcctcagagctgcggccgggagagttcgtggtcgccatcggaagcccgttttcccttcaaaacacagtcaccaccgggatcgtgagcaccacccagcgaggcggcaaagagctggggctccgcaactcagacatggactacatccagaccgacgccatcatcaactatggaaactcgggaggcccgttagtaaacctggacggtgaagtgattggaattaacactttgaaagtgacagctggaatctcctttgcaatcccatctgataagattaaaaagttcctcacggagtcccatgaccgacaggccaaaggaaaagccatcaccaagaagaagtatattggtatccgaatgatgtcactcacgtccagcaaagccaaagagctgaaggaccggcaccgggacttcccagacgtgatctcaggagcgtatataattgaagtaattcctgataccccagcagaagctggtggtctcaaggaaaacgacgtcataatcagcatcaatggacagtccgtggtctccgccaatgatgtcagcgacgtcattaaaagggaaagcaccctgaacatggtggtccgcaggggtaatgaagatatcatgatcacagtgattcccgaagaaattgacccataggcagaggcatgagctggacttcatgtttccctcaaagactctcccgtggatgacggatgaggactctgggctgctggaataggacactcaagacttttgactgccattttgtttgttcagtggagactccctggccaacagaatccttcttgatagtttgcaggcaaaacaaatgtaatgttgcagatccgcaggcagaagctctgcccttctgtatcctatgtatgcagtgtgctttttcttgccagcttgggccattcttgcttagacagtcagcatttgtctcctcctttaactgagtcatcatcttagtccaactaatgcagtcgatacaatgcgtagatagaagaagccccacgggagccaggatgggactggtcgtgtttgtgcttttctccaagtcagcacccaaaggtcaatgcacagagaccccgggtgggtgagcgctggcttctcaaacggccgaagttgcctcttttaggaatctctttggaattgggagcacgatgactctgagtttgagctattaaagtacttcttacaaa

SEQ ID NO: 7 - DNA, 755 bp, human
  misc_feature (522)..(522): n is a, c, g, or t
  misc_feature (666)..(666): n is a, c, g, or t
  misc_feature (697)..(698): n is a, c, g, or t
ctgcaaaggcaacgggtgctccctcacctggtccgaactttcaagttctccttttagcttctctacaatctcttcgagatgcttcactgtgacccgggacttctggagctcctcctctgcggcgcccaccttggccctacacacctgctcctgctcctccacgctcttctgcaggtctctgagcatgccctccgtctccaccaggatgctgcggtactgatcacactcgacctgcagtgtgctctgcgtctcctcggcctccctcaacttggaggccaggtccgaggagggctccgcgatagctgacgggtgcttcagcagcgtggggcctttctctttgagatcctgcagccactcggtgtaattctgttgtgccaagacagagagttctgagagcagagccagcacggcctccatggtctgcgcctcaatcagacggagctgcttctccgattgctccttggcctgtgtcagggagtgcagcttctccttgcaggcctgctctgccgtggccagtgcctncatggctttgcagttgctctcgccgacgtcattggtctcactttctgctgctcgacggactgcctgagctcgatggcctgcttctacagacgcgacagcatgcgaactgcagctgcttgaggcgagtctgactgctgtcaggcntctgctgggctggcctgacatacatggcatnncggcgcatgtgccgtctacagcatgcactcaatgggacggagtcttcatgtgagctg

SEQ ID NO: 8 - DNA, 1850 bp, human
gaatcgcctgccacaggtgtctgcaattgaactccaaggtgcagaatggtttggaaagtagctgtattcctcagtgtggccctgggcattggtgccgttcctatagatgatcctgaagatggaggcaagcactgggcagtgatcgtggcaggttcaaatggctggtataattataggcaccaggcagacgcgtgccatgcctaccagatcattcaccgcaatgggattcctgacgaacagatcgttgtgatgatgtacgatgacattgcttactctgaagacaatcccactccaggaattgtgatcaacaggcccaatggcacagatgtctatcagggagtcccgaaggactacactggagaggatgttaccccacaaaatttccttgctgtgttgagaggcgatgcagaagcagtgaagggtataggatccggcaaagtcctgaagagtggcccccaggatcacgtgttcatttacttcactgaccatggatctactggaatactggtttttcccaatgaagatcttcatgtaaaggacctgaatgagaccatccattacatgtacaaacacaaaatgtaccgaaagatggtgttctacattgaagcctgtgagtctgggtccatgatgaaccacctgccggataacatcaatgtttatgcaactactgctgccaaccccagagagtcgtcctacgcctgttactatgatgagaagaggtccacgtacctgggggactggtacagcgtcaactggatggaagactcggacgtggaagatctgactaaagagaccctgcacaagcagtaccacctggtaaaatcgcacaccaacaccagccacgtcatgcagtatggaaacaaaacaatctccaccatgaaagtgatgcagtttcagggtatgaaacgcaaagccagttctcccgtccccctacctccagtcacacaccttgacctcacccccagccctgatgtgcctctcaccatcatgaaaaggaaactgatgaacaccaatgatctggaggagtccaggcagctcacggaggagatccagcggcatctggatgccaggcacctcattgagaagtcagtgcgtaagatcgtctccttgctggcagcgtccgaggctgaggtggagcagctcctgtccgagagagccccgctcacggggcacagctgctacccagaggccctgctgcacttccggacccactgcttcaactggcactcccccacgtacgagtatgcgttgagacatttgtacgtgctggtcaacctttgtgagaagccgtatccgcttcacaggataaaattgtccatggaccacgtgtgccttggtcactactgaagagctgcctcctggaagcttttccaagtgtgagcgccccaccgacatgtgtgctgatcagagactggagaggtggagtgagaagtctccgctgctcgggccctcctggggagcccccgctccagggctcgctccaggaccttcttcacaagatgacttgctcgctgttacctgcttccccagtcttttctgaaaaactacaaattagggtgggaaaagctctgtattgagaagggtcatatttgctttctaggaggtttgttgttttccctgttagttttgaggagcaggaagctcatgggggcttctgtagcccctctcaaaaggagtctttattctgagaatttgaagctgaaacctctttaaatcttcagaatgattttattgaagaggggcgcaagccccaaatggaaaactgtttttagaaaatatgatgatttttgattgcttttgtatttaattctgcaggtgttcaagtcttaaaaaataaagatttataacag

SEQ ID NO: 9 - DNA, 1887 bp, human
gcgcacggcctgtccgctgcacaccagcttgttggcgtcttcgtcgccgcgctcgccccgggctactcctgcgcgccacaatgagctcccgcatcgccagggcgctcgccttagtcgtcacccttctccacttgaccaggctggcgctctccacctgccccgctgcctgccactgccccctggaggcgcccaagtgcgcgccgggagtcgggctggtccgggacggctgcggctgctgtaaggtctgcgccaagcagctcaacgaggactgcagcaaaacgcagccctgcgaccacaccaaggggctggaatgcaacttcggcgccagctccaccgctctgaaggggatctgcagagctcagtcagagggcagaccctgtgaatataactccagaatctaccaaaacggggaaagtttccagcccaactgtaaacatcagtgcacatgtattgatggcgccgtgggctgcattcctctgtgtccccaagaactatctctccccaacttgggctgtcccaaccctcggctggtcaaagttaccgggcagtgctgcgaggagtgggtctgtgacgaggatagtatcaaggaccccatggaggaccaggacggcctccttggtaaggagctgggattcgatgcctccgaggtggagttgacgagaaacaatgaattgattgcagttggaaaaggcagctcactgaagcggatccctgtttttggaatggagcctcgcatccgatacaaccctttacaaggccagaaatgtattgttcaaacaacttcatggtcccagtgctcaaagacctgtggaactggtatctccacacgagttaccaatgacaaccctgagtgccgccttgtgaaagaaacccggatttgtgaggtgcggccttgtggacagccagtgtacagcagcctgaaaaagggcaagaaatgcagcaagaccaagaaatcccccgaaccagtcaggtttacttacgctggatgtttgagtgtgaagaaataccggcccaagtactgcggttcctgcgtggacggccgatgctgcacgccccagctgaccaggactgtgaagatgcggttccgctgcgaagatggggagacattttccaagaacgtcatgatgatccagtcctgcaaatgcaactacaactgcccgcatgccaatgaagcagcgtttcccttctacaggctgttcaatgacattcacaaatttagggactaaatgctacctgggtttccagggcacacctagacaaacaagggagaagagtgtcagaatcagaatcatggagaaaatgggcgggggtggtgtgggtgatgggactcattgtagaaaggaagccttgctcattcttgaggagcattaaggtatttcgaaactgccaagggtgctggtgcggatggacactaatgcagccacgattggagaatactttgcttcatagtattggagcacatgttactgcttcattttggagcttgtggagttgatgactttctgttttctgtttgtaaattatttgctaagcatattttctctaggcttttttccttttggggttctacagtcgtaaaagagataataagattagttggacagtttaaagcttttattcgtcctttgacaaaagtaaatgggagggcattccatcccttcctgaagggggacactccatgagtgtctgtgagaggcagctatctgcactctaaactgcaaacagaaatcaggtgttttaagactgaatgttttatttatcaaaatgtagcttttggggagggaggggaaatgtaatactggaataatttgtaaatgattttaattttatattcagtgaaaagattttatttatggaattaaccatttaataaagaaatatttacct

SEQ ID NO: 10 - DNA, 4792 bp, human
ggaccacccagtaccgatcccttcacgaccgtcaccatggaagtgtcaccattgcagcctgtaaatgaaaatatgcaagtcaacaaaataaagaaaaatgaagatgctaagaaaagactgtctgttgaaagaatctatcaaaagaaaacacaattggaacatattttgctccgcccagacacctacattggttctgtggaattagtgacccagcaaatgtgggtttacgatgaagatgttggcattaactatagggaagtcacttttgttcctggtttgtacaaaatctttgatgagattctagttaatgctgcggacaacaaacaaagggacccaaaaatgtcttgtattagagtcacaattgatccggaaaacaatttaattagtatatggaataatggaaaaggtattcctgttgttgaacacaaagttgaaaagatgtatgtcccagctctcatatttggacagctcctaacttctagtaactatgatgatgatgaaaagaaagtgacaggtggtcgaaatggctatggagccaaattgtgtaacatattcagtaccaaatttactgtggaaacagccagtagagaatacaagaaaatgttcaaacagacatggatggataatatgggaagagctggtgagatggaactcaagcccttcaatggagaagattatacatgtatcacctttcagcctgatttgtctaagtttaaaatgcaaagcctggacaaagatattgttgcactaatggtcagaagagcatatgatattgctggatccaccaaagatgtcaaagtctttcttaatggaaataaactgccagtaaaaggatttcgtagttatgtggacatgtatttgaaggacaagttggatgaaactggtaactccttgaaagtaatacatgaacaagtaaaccacaggtgggaagtgtgtttaactatgagtgaaaaaggctttcagcaaattagctttgtcaacagcattgctacatccaagggtggcagacatgttgattatgtagctgatcagattgtgactaaacttgttgatgttgtgaagaagaagaacaagggtggtgttgcagtaaaagcacatcaggtgaaaaatcacatgtggatttttgtaaatgccttaattgaaaacccaacctttgactctcagacaaaagaaaacatgactttacaacccaagagctttggatcaacatgccaattgagtgaaaaatttatcaaagctgccattggctgtggtattgtagaaagcatactaaactgggtgaagtttaaggcccaagtccagttaaacaagaagtgttcagctgtaaaacataatagaatcaagggaattcccaaactcgatgatgccaatgatgcagggggccgaaactccactgagtgtacgcttatcctgactgagggagattcagccaaaactttggctgtttcaggccttggtgtggttgggagagacaaatatggggttttccctcttagaggaaaaatactcaatgttcgagaagcttctcataagcagatcatggaaaatgctgagattaacaatatcatcaagattgtgggtcttcagtacaagaaaaactatgaagatgaagattcattgaagacgcttcgttatgggaagataatgattatgacagatcaggaccaagatggttcccacatcaaaggcttgctgattaattttatccatcacaactggccctctcttctgcgacatcgttttctggaggaatttatcactcccattgtaaaggtatctaaaaacaagcaagaaatggcattttacagccttcctgaatttgaagagtggaagagttctactccaaatcataaaaaatggaaagtcaaatattacaaaggtttgggcaccagcacatcaaaggaagctaaagaatactttgcagatatgaaaagacatcgtatccagttcaaatattctggtcctgaagatgatgctgctatcagcctggcctttagcaaaaaacagatagatgatcgaaaggaatggttaactaatttcatggaggatagaagacaacgaaagttacttgggcttcctgaggattacttgtatggacaaactaccacatatctgacatataatgacttcatcaacaaggaacttatcttgttctcaaattctgataacgagagatctatcccttctatggtggatggtttgaaaccaggtcagagaaaggttttgtttacttgcttcaaacggaatgacaagcgagaagtaaaggttgcccaattagctggatcagtggctgaaatgtcttcttatcatcatggtgagatgtcactaatgatgaccattatcaatttggctcagaattttgtgggtagcaataatctaaacctcttgcagcccattggtcagtttggtaccaggctacatggtggcaaggattctgctagtccacgatacatctttacaatgctcagctctttggctcgattgttatttccaccaaaagatgatcacacgttgaagtttttatatgatgacaaccagcgtgttgagcctgaatggtacattcctattattcccatggtgctgataaatggtgctgaaggaatcggtactgggtggtcctgcaaaatccccaactttgatgtgcgtgaaattgtaaataacatcaggcgtttgatggatggagaagaacctttgccaatgcttccaagttacaagaacttcaagggtactattgaagaactggctccaaatcaatatgtgattagtggtgaagtagctattcttaattctacaaccattgaaatctcagagcttcccgtcagaacatggacccagacatacaaagaacaagttctagaacccatgttgaatggcaccgagaagacacctcctctcataacagactatagggaataccatacagataccactgtgaaatttgttgtgaagatgactgaagaaaaactggcagaggcagagagagttggactacacaaagtcttcaaactccaaactagtctcacatgcaactctatggtgctttttgaccacgtaggctgtttaaagaaatatgacacggtgttggatattctaagagacttttttgaactcagacttaaatattatggattaagaaaagaatggctcctaggaatgcttggtgctgaatctgctaaactgaataatcaggctcgctttatcttagagaaaatagatggcaaaataatcattgaaaataagcctaagaaagaattaattaaagttctgattcagaggggatatgattcggatcctgtgaaggcctggaaagaagcccagcaaaaggttccagatgaagaagaaaatgaagagagtgacaacgaaaaggaaactgaaaagagtgactccgtaacagattctggaccaaccttcaactatcttcttgatatgcccctttggtatttaaccaaggaaaagaaagatgaactctgcaggctaagaaatgaaaaagaacaagagctggacacattaaaaagaaagagtccatcagatttgtggaaagaagacttggctacatttattgaagaattggaggctgttgaagccaaggaaaaacaagatgaacaagtcggacttcctgggaaaggggggaaggccaaggggaaaaaaacacaaatggctgaagttttgccttctccgcgtggtcaaagagtcattccacgaataaccatagaaatgaaagcagaggcagaaaagaaaaataaaaagaaaattaagaatgaaaatactgaaggaagccctcaagaagatggtgtggaactagaaggcctaaaacaaagattagaaaagaaacagaaaagagaaccaggtacaaagacaaagaaacaaactacattggcatttaagccaatcaaaaaaggaaagaagagaaatccctggcctgattcagaatcagataggagcagtgacgaaagtaattttgatgtccctccacgagaaacagagccacggagagcagcaacaaaaacaaaattcacaatggatttggattcagatgaagatttctcagattttgatgaaaaaactgatgatgaagattttgtcccatcagatgctagtccacctaagaccaaaacttccccaaaacttagtaacaaagaactgaaaccacagaaaagtgtcgtgtcagaccttgaagctgatgatgttaagggcagtgtaccactgtcttcaagccctcctgctacacatttcccagatgaaactgaaattacaaacccagttcctaaaaagaatgtgacagtgaagaagacagcagcaaaaagtcagtcttccacctccactaccggtgccaaaaaaagggctgccccaaaaggaactaaaagggatccagctttgaattctggtgtctctcaaaagcctgatcctgccaaaaccaagaatcgccgcaaaaggaagccatccacttctgatgattctgactctaattttgagaaaattgtttcgaaagcagtcacaagcaagaaatccaagggggagagtgatgacttccatatggactttgactcagctgtggctcctcgggcaaaatctgtacgggcaaagaaacctataaagtacctggaagagtcagatgaagatgatctgttttaaaatgtgaggcgattattttaagtaattatcttaccaagcccaagactggttttaaagttacctgaagctcttaacttcctcccctctgaatttagtttggggaaggtgtttttagtacaagacatcaaagtgaagtaaagcccaagtgttctttagcttt

SEQ ID NO: 11 - DNA, 2797 bp, human
ttccccagcattcgagaaactcctctctactttagcacggtctccagactcagccgagagacagcaaactgcagcgcggtgagagagcgagagagagggagagagagactctccagcctgggaactataactcctctgcgagaggcggagaactccttccccaaatcttttggggacttttctctctttacccacctccgcccctgcgaggagttgaggggccagttcggccgccgcgcgcgtcttcccgttcggcgtgtgcttggcccggggaaccgggagggcccggcgatcgcgcggcggccgccgcgagggtgtgagcgcgcgtgggcgcccgccgagccgaggccatggtgcagcaaaccaacaatgccgagaacacggaagcgctgctggccggcgagagctcggactcgggcgccggcctcgagctgggaatcgcctcctcccccacgcccggctccaccgcctccacgggcggcaaggccgacgacccgagctggtgcaagaccccgagtgggcacatcaagcgacccatgaacgccttcatggtgtggtcgcagatcgagcggcgcaagatcatggagcagtcgcccgacatgcacaacgccgagatctccaagcggctgggcaaacgctggaagctgctcaaagacagcgacaagatccctttcattcgagaggcggagcggctgcgcctcaagcacatggctgactaccccgactacaagtaccggcccaggaagaaggtgaagtccggcaacgccaactccagctcctcggccgccgcctcctccaagccgggggagaagggagacaaggtcggtggcagtggcgggggcggccatgggggcggcggcggcggcgggagcagcaacgcggggggaggaggcggcggtgcgagtggcggcggcgccaactccaaaccggcgcagaaaaagagctgcggctccaaagtggcgggcggcgcgggcggtggggttagcaaaccgcacgccaagctcatcctggcaggcggcggcggcggcgggaaagcagcggctgccgccgccgcctccttcgccgccgaacaggcgggggccgccgccctgctgcccctgggcgccgccgccgaccaccactcgctgtacaaggcgcggactcccagcgcctcggcctccgcctcctcggcagcctcggcctccgcagcgctcgcggccccgggcaagcacctggcggagaagaaggtgaagcgcgtctacctgttcggcggcctgggcacgtcgtcgtcgcccgtgggcggcgtgggcgcgggagccgaccccagcgaccccctgggcctgtacgaggaggagggcgcgggctgctcgcccgacgcgcccagcctgagcggccgcagcagcgccgcctcgtcccccgccgccggccgctcgcccgccgaccaccgcggctacgccagcctgcgcgccgcctcgcccgccccgtccagcgcgccctcgcacgcgtcctcctcggcctcgtcccactcctcctcttcctcctcctcgggctcctcgtcctccgacgacgagttcgaagacgacctgctcgacctgaaccccagctcaaactttgagagcatgtccctgggcagcttcagttcgtcgtcggcgctcgaccgggacctggattttaacttcgagcccggctccggctcgcacttcgagttcccggactactgcacgcccgaggtgagcgagatgatctcgggagactggctcgagtccagcatctccaacctggttttcacctactgaagggcgcgcaggcagggagaagggccggggggggtaggagaggagaaaaaaaaagtgaaaaaaagaaacgaaaaggacagacgaagagtttaaagagaaaagggaaaaaagaaagaaaaagtaagcagggctcgttcgcccgcgttctcgtcgtcggatcaaggagcgcggcggcgttttggacccgcgctcccatcccccaccttcccgggccggggacccactctgcccagccggagggacgcggaggaggaagagggtagacaggggcgacctgtgattgttgttattgatgttgttgttgatggcaaaaaaaaaaagcgacttcgagtttgctcccctttgcttgaagagaccccctcccccttccaacgagcttccggacttgtctgcacccccagcaagaaggcgagttagttttctagagacttgaaggagtctcccccttcctgcatcaccaccttggttttgttttattttgcttcttggtcaagaaaggaggggagaacccagcgcacccctccccccctttttttaaacgcgtgatgaagacagaaggctccggggtgacgaatttggccgatggcagatgttttgggggaacgccgggactgagagactccacgcaggcgaattcccgtttggggcctttttttcctccctcttttccccttgccccctctgcagccggaggaggagatgttgaggggaggaggccagccagtgtgaccggcgctaggaaatgacccgagaaccccgttggaagcgcagcagcgggagctaggggcgggggcggaggaggacacgaactggaagggggttcacggtcaaactgaaatggatttgcacgttggggagctggcggcggcggctgctgggcctccgccttcttttctacgtgaaatcagtgaggtgagacttcccagaccccggaggcgtggaggagaggagactgtttgatgtggtacaggggcagtcagtggagggcgagtggtttcggaaaaaaaaaaagaaaaaaaggg

SEQ ID NO: 12 - DNA, 362 bp, human
gatccagaaatacttaacacgtgaatattttgctaaaaaagcatatataactattttaaatatccatttatcttttgtatatctaagactcatcctgatttttactatcacacatgaataaaggcctttgtatctttctttctctaatgttgtatcatactcttctaaaacttgagtggctgtcttaaaagatataaggggaaagataatattgtctgtctctatattgcttagtaagtatttccatagtcaatgatggtttaataggtaaaccaaaccctataaacctgacctcctttatggttaatactattaagcaagaatgcagtacagaattggatacagtacggatttgtccaaat

SEQ ID NO: 13 - DNA, 604 bp, human
  misc_feature (374)..(374): n is a, c, g, or t
  misc_feature (450)..(450): n is a, c, g, or t
  misc_feature (463)..(463): n is a, c, g, or t
  misc_feature (487)..(487): n is a, c, g, or t
  misc_feature (548)..(548): n is a, c, g, or t
  misc_feature (560)..(560): n is a, c, g, or t
  misc_feature (565)..(565): n is a, c, g, or t
  misc_feature (587)..(587): n is a, c, g, or t
tgggtcttggcattttaataaacgttcaaagaaacaaaatttacttgtaggggacgtgacaaagaacagaacccaaagactgcctgccttctcggcagaccctagggagctgtggtgatgtgacagctgccacagcggctatcttccatggaaataacgtacgtcatcaacacaatatacaacaccccttccactcacctgacccacccacctccctcctacatgccctaccccagcccctctgcaccctccaccttgctccaggctcccaccacccactcaccccaaataacctgcgtcccttttgttcatttccctgacgtcccagcttgtctggtccccttggtcataagatggcaggcacttacacacgnttcttcaacacttatggataagaggcaggactctttttaacttagtgggcctggtcttgaattggcatggcatgtnaatggggggggangggggagttaaaaaaaatcaaggntatgggttaacagggaaacaaaggggatattttgtaaaagctagggaaagcgggggggtanaatttggggaanaaaangggttgaggggtattggattcntttggatgacaaccggt

SEQ ID NO: 14 - DNA, 5047 bp, human
ccgttgctgtcgccgttgctgtcgggggcgctgtgcgctgaggaaggcgcgggcgagccggagcagaagaaggagggagggagccagccgctgcagccaccaccgccaccatgtcctaccaaggcaagaagaacatcccgcggatcacgagtgaccgtctccttatcaagggaggcagaatcgtcaatgatgatcagtccttttatgctgatatttacatggaagatggcttaataaaacaaattggagacaatctgattgttcctggaggagtgaagaccattgaagccaatgggaagatggtgatccctggaggcatcgatgtccatactcacttccagatgccatataagggaatgaccacagtagatgacttcttccaagggacaaaggcggccttagcaggtggcaccaccatgatcattgaccatgtggtgcctgagcctgagtccagcctgactgaggcctatgagaaatggagagagtgggctgatgggaagagttgctgtgactatgccctgcatgtggacatcacccactggaatgacagcgtcaagcaggaagtgcagaacctcatcaaggacaaaggggttaactccttcatggtttatatggcttataaggatttgtatcaagtatctaacacagagctctatgagatcttcacctgcctgggagagctgggggccattgctcaagttcatgctgagaatggggatatcattgcccaggagcaaacccgcatgttggaaatggggataactggcccagaaggccatgtactgagcaggccagaagagctggaagctgaggctgtgttccgtgccatcaccattgccagccaaaccaattgccctctctacgtcacaaaggtcatgagcaagagtgcagctgacctcatctcacaagccaggaaaaaaggaaatgtagtctttggtgagcccatcactgccagcctcggcatagatggaacccattattggagcaagaactgggccaaggcggctgcatttgtgacatccccacccctgagccctgacccaactactccggactacatcaactccttgctggccagcggggatctgcagctatctgggagtgcccactgcaccttcagcactgcccagaaagcaattgggaaggacaacttcacagccattcctgagggcaccaatggtgtggaggagcggatgtctgtcatctgggacaaggctgtggccacagggaaaatggacgaaaaccagttcgtggctgtgacaagcacaaacgctgccaagatcttcaacctgtatccccgcaagggaagaatatctgtgggttctgacagcgacctcgtcatctgggatccagatgctgtgaagatcgtctctgccaagaaccaccagtctgcggcagagtacaacatctttgaagggatggagctgcgcggggctcctctggttgtcatctgccagggcaagatcatgctggaagatggcaacctgcacgtgacccagggggctggccgcttcataccctgcagcccgttctccgactatgtctacaagcgcattaaagcacggaggaagatggcagacctgcatgccgtcccaaggggcatgtacgatgggcctgtgtttgacctgaccaccacccccaaaggtggcacccccgcaggctctgctcggggctctcctactcggccgaacccacctgtgaggaatcttcatcagtcgggatttagcctgtcaggcacccaagtggatgagggggttcgctcagccagcaagcgcatcgtggcccccccaggcggccgttctaatatcacatctctgagttaagcaagccttcctcaaagagaggggcagaagcaagaagagattgttttgaagccaaaatggtacaccgatatttaagaaggaaagcgaatccaaacggttgtgatctaaagaatcaataagcctcaagccttatgtttctccaatgttacgctcgcttgcctagctttacgaatattgctttgttttctgtttatgcatagccttgatttgtttgactcccctccccccatttacatgcatgcaatcagacaggccactaaggtaaaagagtctgctctatcatagtgttgagagcgtgtgtagtgctgcatcttatgacaaggggacagacaagctgggacgtcagggaaatgaacaaaagggacgcaggttatttggggtgagtgggtggtgggagcctggagcaaggtggagggtgcagaggggctggggtagggcatgtaggagggaggtgggtgggtcaggtgagtggaaggggtgttgtatattgtgttgatgacgtacgttatttccatggaagatagccgctgtggcagctgtcacatcaccacagctccctagggtctgccgagaaggcaggcagtctttgggttctgttctttgtcacgtcccctacaagtaaattttgtttctttgaacgtttattaaaatgccaagacccaaccatttcttccacctgcttgattgtgccagtgtttgctcaggcctctttcttagtgttgctttcaaatccttctctttcctgggttgggaaggccaggcagggacagagcaaatgacacttctcttcctcttgccctccctgcctctttggtgctcttaaaagccagcagctgagaacatagcacaggcccacgtggtgagggcacccacagcttaaagacgcttccttctaaacacggcgaggtcacctctcactcttctgtctttgcaaaccgagaagagtggcatgcttctggcatcccaagtcaggattttagctcagatgaggcagaatgaagggcctctcttacaggcagtttgtgtttgattctctcgatcctggcacatccatgataaataggagtttttgaaagttggttttattaggtgttccctaatttttaccgtaataggtcatctcagcttatatgaaagtcaagtggggaactgggaaagccaaagtcagtcttgagcagagggagcacattttgtggacctggttccacctttccattccaaaccacctgtttccccttccattagcagaaactctgggggaactttgtgtctcagtcctagaatctccccaagtgagtggaagtgacatgatgcagtcttcctcatggggcacctgaaagaaattagtgtgggtgcttcgatctaccttgtctgtcagagttgaatatctctttccctatcatgctgcttctgaaaattcagttttggagcaagtcctgtgagcaagataagaatctatagaaccaagatgctcattttcagaagaaatatgttcaacctgggatcagacttccatgctctggggaatccaagtggtagcacctgtaaccctgtgtactaagtgctttgaagagaagagcaggcctcagacaccttttaattgcttaggagaaaccattgtctctgactgcaggtttgaataagttgaagaccagagaaaagtacacactgggctacaaaggaatttggagatagccaaggaacaggatttcccctagcaagctaccttctgttcaaatcatgaaaaaagactatttccccttagaatagggaagcttgctattttaaagctcttgtagtgcttttcttttaagggagatgtagtaaaagggaaaatgtagctcttagtttacacttcaaagatgtgggggtctttcagagaactaagaataacagttttatgtgcagagagagtttgccagatctgaagcatatacctcattgactaggctgttactttgggataggttgcagtaccagccacagccagcagatagaggaaaagacacacataaactcgcttctgagcgtccacttctgcactctctgctctgctgttactcagcccctgagtctgactcatctctgcacaacctctctgtgccatgaagataagtcttccatggccaaatcggtcatccgcactgcccttgggacttccgaagtgaaccattccaccagaacctttgattctgcacaagatttccttgctctgggaacaacccccaaatgcccttgggaggaacaacatgagctcaggaagcctctctttcttcacttaccattactaactctccaagcatagaaatccctgggaattgcgagaataactcccactattttaaaatttatattcagatttgtttcgtttcataagacacatcaaacaggcctatacaaaaggtttaggaaaagaaaacaatggtgagtcccggccctcttcgaattcactggcacctcatgcaagtgtaggaaggcacgctggatcgtctatctgattccaaagctgtcctttgccatctcatcccttggcctgccccccaaccctgaggatgcccctgccatccccccaacctcctcatattgcctctgaacccagatggcaatccatcccggttctctctgagggccacgggcttgggtagtggaaagggtgtttgggaaattgttaaatcagttacccgtagtagagctatttcttgtacttctaagttttctagaagtggaaggattgtagtcatcctgaaaatgggtttacttcaaaatccctcagccttgttcttcacgactgtctatactgagagtgtcatgtttccacaaagggctgacacctgagcctggattttcactcatccctgagaagccctttccagtagggtgggcaattcccaacttccttgccacaagcttcccaggctttctcccctggaaaactccagcttgagtcccagatacactcatgggctgccctgggcagccagcattcattgtaagttccctctttgaaaactggtgtgtgggtgttcagttctgtgtctggtgggtatggacagacagtaatctcctgtgatctgtgctagctgtgaggcagctctggaacgtgaagagctgtttggtttgaaccgtgaacaaaactgtgttttgagtttagctgacattaaagaaaaaagttcatcacgtgactgttaatgtaaacctggttattaaaataactatgaaattac

SEQ ID NO: 15 - DNA, 10558 bp, human
cagtttggagctcagtcttccaccaaaggccgttcagttctcctgggctccagcctcctgcaaggactgcaagagttttcctccgcagctctgagtctccacttttttggtggagaaaggctgcaaaaagaaaaagagacgcagtgagtgggaaaagtatgcatcctattcaaacctaattgaatcgaggagcccagggacacacgccttcaggtttgctcaggggttcatatttggtgcttagacaaattcaaaatgaggaaacatcggcacttgcccttagtggccgtcttttgcctctttctctcaggctttcctacaactcatgcccagcagcagcaagcagatgtcaaaaatggtgcggctgctgatataatatttctagtggattcctcttggaccattggagaggaacatttccaacttgttcgagagtttctatatgatgttgtaaaatccttagctgtgggagaaaatgatttccattttgctctggtccagttcaacggaaacccacataccgagttcctgttaaatacgtatcgtactaaacaagaagtcctttctcatatttccaacatgtcttatattgggggaaccaatcagactggaaaaggattagaatacataatgcaaagccacctcaccaaggctgctggaagccgggccggtgacggagtccctcaggttatcgtagtgttaactgatggacactcgaaggatggccttgctctgccctcagcggaacttaagtctgctgatgttaacgtgtttgcaattggagttgaggatgcagatgaaggagcgttaaaagaaatagcaagtgaaccgctcaatatgcatatgttcaacctagagaattttacctcacttcatgacatagtaggaaacttagtgtcctgtgtgcattcatccgtgagtccagaaagggctggggacacggaaacccttaaagacatcacagcacaagactctgctgacattattttccttattgatggatcaaacaacaccggaagtgtcaatttcgcagtcattctcgacttccttgtaaatctccttgagaaactcccaattggaactcagcagatccgagtgggggtggtccagtttagcgatgagcccagaaccatgttttccttggacacctactccaccaaggcccaggttctgggtgcagtgaaagccctcgggtttgctggtggggagttggccaatatcggcctcgcccttgatttcgtggtggagaaccacttcacccgggcagggggcagccgcgtggaggaaggggttccccaggtgctggtcctcataagtgccgggccttctagtgacgagattcgctacggggtggtagcactgaagcaggctagcgtgttctcattcggccttggagcccaggccgcctccagggcagagcttcagcacatagctaccgatgacaacttggtgtttactgtcccggaattccgtagctttggggacctccaggagaaattactgccgtacattgttggcgtggcccaaaggcacattgtcttgaaaccgccaaccattgtcacacaagtcattgaagtcaacaagagagacatagtcttcctggtggatggctcatctgcactgggactggccaacttcaatgccatccgagacttcattgctaaagtcatccagaggctggaaatcggacaggatcttatccaggtggcagtggcccagtatgcagacactgtgaggcctgaattttatttcaatacccatccaacaaaaagggaagtcataaccgctgtgcggaaaatgaagcccctggacggctcggccctgtacacgggctctgctctagactttgttcgtaacaacctattcacgagttcagccggctaccgggctgccgaggggattcctaagcttttggtgctgatcacaggtggtaagtccctagatgaaatcagccagcctgcccaggagctgaagagaagcagcataatggcctttgccattgggaacaagggtgccgatcaggctgagctggaagagatcgctttcgactcctccctggtgttcatcccagctgagttccgagccgccccattgcaaggcatgctgcctggcttgctggcacctctcaggaccctctctggaacccctgaagttcactcaaacaaaagagatatcatctttcttttggatggatcagccaacgttggaaaaaccaatttcccttatgtgcgcgactttgtaatgaacctagttaacagccttgatattggaaatgacaatattcgtgttggtttagtgcaatttagtgacactcctgtaacggagttctctttaaacacataccagaccaagtcagatatccttggtcatctgaggcagctgcagctccagggaggttcgggcctgaacacaggctcagccctaagctatgtctatgccaaccacttcacggaagctggcggcagcaggatccgtgaacacgtgccgcagctcctgcttctgctcacagctgggcagtctgaggactcctatttgcaagctgccaacgccttgacacgcgcgggcatcctgactttttgtgtgggagctagccaggcgaataaggcagagcttgagcagattgcttttaacccaagcctggtgtatctcatggatgatttcagctccctgccagctttgcctcagcagctgattcagcccctaaccacatatgttagtggaggtgtggaggaagtaccactcgctcagccagagagcaagcgagacattctgttcctctttgacggctcagccaatcttgtgggccagttccctgttgtccgtgactttctctacaagattatcgatgagctcaatgtgaagccagaggggacccgaattgcggtggctcagtacagcgatgatgtcaaggtggagtcccgttttgatgagcaccagagtaagcctgagatcctgaatcttgtgaagagaatgaagatcaagacgggcaaagccctcaacctgggctacgcgctggactatgcacagaggtacatttttgtgaagtctgctggcagccggatcgaggatggagtgcttcagttcctggtgctgctggtcgcaggaaggtcatctgaccgtgtggatgggccagcaagtaacctgaagcagagtggggttgtgcctttcatcttccaagccaagaacgcagaccctgctgagttagagcagatcgtgctgtctccagcgtttatcctggctgcagagtcgcttcccaagattggagatcttcatccacagatagtgaatctcttaaaatcagtgcacaacggagcaccagcaccagtttcaggtgaaaaggacgtggtgtttctgcttgatggctctgagggcgtcaggagcggcttccctctgttgaaagagtttgtccagagagtggtggaaagcctggatgtgggccaggaccgggtccgcgtggccgtggtgcagtacagcgaccggaccaggcccgagttctacctgaattcatacatgaacaagcaggacgtcgtcaacgctgtccgccagctgaccctgctgggagggccgacccccaacaccggggccgccctggagtttgtcctgaggaacatcctggtcagctctgcgggaagcaggataacagaaggtgtgccccagctgctgatcgtcctcacggccgacaggtctggggatgatgtgcggaacccctccgtggtcgtgaagaggggtggggctgtgcccattggcattggcatcgggaacgctgacatcacagagatgcagaccatctccttcatcccggactttgccgtggccattcccacctttcgccagctggggaccgtccaacaggtcatctctgagagggtgacccagctcacccgcgaggagctgagcaggctgcagccggtgttgcagcctctaccgagcccaggtgttggtggcaagagggacgtggtctttctcatcgatgggtcccaaagtgccgggcctgagttccagtacgttcgcaccctcatagagaggctggttgactacctggacgtgggctttgacaccacccgggtggctgtcatccagttcagcgatgaccccaaggcggagttcctgctgaacgcccattccagcaaggatgaagtgcagaacgcggtgcagcggctgaggcccaagggagggcggcagatcaacgtgggcaatgccctggagtacgtgtccaggaacatcttcaagaggcccctggggagccgcattgaagagggcgtcccacagttcctggtcctcatctcgtctggaaagtctgacgatgaggtggtcgtcccggcggtggagctcaagcagtttggcgtggcccctttcacgatcgccaggaacgcagaccaggaggagctggtgaagatctcgctgagccccgaatatgtgttctcggtgagcaccttccgggagctgcccagcctggagcagaaactgctgacgcccatcacgaccctgacctcagagcagatccagaagctcttagccagcactcgctatccacctccagcagttgagagtgatgctgcagacattgtctttctgatcgacagctctgagggagttaggccagatggctttgcacatattcgagattttgttagcaggattgttcgaagactcaacatcggccccagtaaagtgagagttggggtcgtgcagttcagcaatgatgtcttcccagaattctatctgaaaacctacagatcccaggccccggtgctggacgccatacggcgcctgaggctcagaggggggtccccactgaacactggcaaggctctcgaatttgtggcaagaaacctctttgttaagtctgcggggagtcgcatagaagacggggtgccccaacacctggtcctggtcctgggtggaaaatcccaggacgatgtgtccaggttcgcccaggtgatccgttcctcgggcattgtgagtttaggggtaggagaccggaacatcgacagaacagagctgcagaccatcaccaatgaccccagactggtcttcacagtgcgagagttcagagagcttcccaacatagaagaaagaatcatgaactcgtttggaccctccgcagccactcctgcacctccaggggtggacacccctcctccttcacggccagagaagaagaaagcagacattgtgttcctgttggatggttccatcaacttcaggagggacagtttccaggaagtgcttcgttttgtgtctgaaatagtggacacagtttatgaagatggcgactccatccaagtggggcttgtccagtacaactctgaccccactgacgaattcttcctgaaggacttctctaccaagaggcagattattgacgccatcaacaaagtggtctacaaagggggaagacacgccaacactaaggtgggccttgagcacctgcgggtaaaccactttgtgcctgaggcaggcagccgcctggaccagcgggtccctcagattgcctttgtgatcacgggaggaaagtcggtggaagatgcacaggatgtgagcctggccctcacccagaggggggtcaaagtgtttgctgttggagtgaggaatatcgactcggaggaggttggaaagatagcgtccaacagcgccacagcgttccgcgtgggcaacgtccaggagctgtccgaactgagcgagcaagttttggaaactttgcatgatgcgatgcatgaaaccctttgccctggtgtaactgatgctgccaaagcttgtaatctggatgtgattctggggtttgatggttctagagaccagaatgtttttgtggcccagaagggcttcgagtccaaggtggacgccatcttgaacagaatcagccagatgcacagggtcagctgcagcggtggccgctcgcccaccgtgcgtgtgtcagtggtggccaacacgccctcgggcccggtggaggcctttgactttgacgagtaccagccagagatgctcgagaagttccggaacatgcgcagccagcacccctacgtcctcacggaggacaccctgaaggtctacctgaacaagttcagacagtcctcgccggacagcgtgaaggtggtcattcattttactgatggagcagacggagatctggctgatttacacagagcatctgagaacctccgccaagaaggagtccgtgccttgatcctggtgggccttgaacgagtggtcaacttggagcggctaatgcatctggagtttgggcgagggtttatgtatgacaggcccctgaggcttaacttgctggacttggattatgaactagcggagcagcttgacaacattgccgagaaagcttgctgtggggttccctgcaagtgctctgggcagaggggagaccgcgggcccatcggcagcatcgggccaaagggtattcctggagaagacggctaccgaggctatcctggtgatgagggtggacccggtgagcgtggtccgcctggtgtgaacggcactcaaggtttccagggctgcccgggccagagaggagtaaagggctctcggggattcccaggagagaagggcgaagtaggagaaattggactggatggtctggatggtgaagatggagacaaaggattgcctggttcttctggagagaaagggaatcctggaagaaggggtgataaaggacctcgaggagagaaaggagaaagaggagatgttgggattcgaggggacccgggtaacccaggacaagacagccaggagagaggacccaaaggagaaaccggtgacctcggccccatgggtgtcccagggagagatggagtacctggaggacctggagaaactgggaagaatggtggctttggccgaaggggaccccccggagctaagggcaacaagggcggtcctggccagccgggctttgagggagagcaggggaccagaggtgcacagggcccagctggtcctgctggtcctccagggctgataggagaacaaggcatttctggacctaggggaagcggaggtgcccgtggcgctcctggagaacgaggcagaaccggtccactgggaagaaagggtgagcccggagagccaggaccaaaaggaggaatcgggaacccgggccctcgtggggagacgggagatgacgggagagacggagttggcagtgaaggacgcagaggcaaaaaaggagaaagaggatttcctggatacccaggaccaaagggtaacccaggtgaacctgggctaaatggaacaacaggacccaaaggcatcagaggccgaaggggaaattcgggacctccagggatagttggacagaaggggagacctggctacccaggaccagctggtccaaggggcaacaggggcgactccatcgatcaatgtgccctcatccaaagcatcaaagataaatgcccttgctgttacgggcccctggagtgccccgtcttcccaacagaactagcctttgctttagacacctctgagggagtcaaccaagacactttcggccggatgcgagatgtggtcttgagtattgtgaatgtcctgaccattgctgagagcaactgcccgacgggggcccgggtggctgtggtcacctacaacaacgaggtgaccacggagatccggtttgctgactccaagaggaagtcggtcctcctggacaagattaagaaccttcaggtggctctgacatccaaacagcagagtctggagactgccatgtcgtttgtggccaggaacacatttaagcgtgtgaggaacggattcctaatgaggaaagtggctgttttcttcagcaacacacccacaagagcatccccacagctcagagaggctgtgctcaaactctcagatgcggggatcacccccttgttccttacaaggcaggaagaccggcagctcatcaacgctttgcagatcaataacacagcagtggggcatgcgcttgtcctgcctgcagggagagacctcacagacttcctggagaatgtcctcacgtgtcatgtttgcttggacatctgcaacatcgacccatcctgtggatttggcagttggaggccttccttcagggacaggagagcggcagggagtgatgtggacatcgacatggctttcatcttagacagcgctgagaccaccaccctgttccagttcaatgagatgaagaagtacatagcgtacctggtcagacaactggacatgagcccagatcccaaggcctcccagcacttcgccagagtggcagttgtgcagcacgcgccctctgagtccgtggacaatgccagcatgccacctgtgaaggtggaattctccctgactgactatggctccaaggagaagctggtggacttcctcagcaggggaatgacacagttgcagggaaccagggccttaggcagtgccattgaatacaccatagagaatgtctttgaaagtgccccaaacccacgggacctgaaaattgtggtcctgatgctgacgggcgaggtgccggagcagcagctggaggaggcccagagagtcatcctgcaggccaaatgcaagggctacttcttcgtggtcctgggcattggcaggaaggtgaacatcaaggaggtatacaccttcgccagtgagccaaacgacgtcttcttcaaattagtggacaagtccaccgagctcaacgaggagcctttgatgcgcttcgggaggctgttgccgtccttcgtcagcagtgaaaatgctttttacttgtccccagatatcaggaaacagtgtgattggttccaaggggaccaacccacaaagaaccttgtgaagtttggtcacaaacaagtaaatgttccgaataacgttacttcaagtcctacatccaacccagtgacgacaacgaagccggtgactacgacgaagccggtgaccaccacaacaaagcctgtaaccaccacaacaaagcctgtgactattataaatcagccatctgtgaagccagccgctgcaaagccggcccctgcgaaacctgtggctgccaagcctgtggccacaaagacggccactgttagacccccagtggcggtgaagccagcaacagcagcgaagcctgtagcagcaaagccagcagctgtaagaccccccgctgctgctgcaaaaccagtggcgaccaagcctgaggtccctaggccacaggcagccaaaccagctgccaccaagccagccaccactaagcccgtggttaagatgctccgtgaagtccaggtgtttgagataacagagaacagcgccaaactccactgggagaggcctgagccccccggtccttatttttatgacctcaccgtcacctcagcccatgatcagtccctggttctgaagcagaacctcacggtcacggaccgcgtcattggaggcctgctcgctgggcagacataccatgtggctgtggtctgctacctgaggtctcaggtcagagccacctaccacggaagtttcagtacaaagaaatctcagcccccacctccacagccagcaaggtcagcttctagttcaaccatcaatctaatggtgagcacagaaccattggctctcactgaaacagatatatgcaagttgccgaaagacgaaggaacttgcagggatttcatattaaaatggtactatgatccaaacaccaaaagctgtgcaagattctggtatggaggttgtggtggaaacgaaaacaaatttggatcacagaaagaatgtgaaaaggtttgcgctcctgtgctcgccaaacccggagtcatcagtgtgatgggaacctaagcgtgggtggccaacatcatatacctcttgaagaagaaggagtcagccatcgccaacttgtctctgtagaagctccgggtgtagattcccttgcactgtatcatttcatgctttgatttacactcgaactcgggagggaacatcctgctgcatgacctatcagtatggtgctaatgtgtctgtggaccctcgctctctgtctccagcagttctctcgaatactttgaatgttgtgtaacagttagccactgctggtgtttatgtgaacattcctatcaatccaaattccctctggagtttcatgttatgcctgttgcaggcaaatgtaaagtctagaaaataatgcaaatgtcacggctactctatatacttttgcttggttcattttttttcccttttagttaagcatgactttagatgggaagcctgtgtatcgtggagaaacaagagaccaactttttcattccctgcccccaatttcccagactagatttcaagctaattttctttttctgaagcctctaacaaatgatctagttcagaaggaagcaaaatcccttaatctatgtgcaccgttgggaccaatgccttaattaaagaatttaaaaaagttgtaatagagaatatttttggcattcctctcaatgttgtgtgttttttttttttgtgtgctggagggaggggatttaattttaattttaaaatgtttaggaaatttatacaaagaaactttttaataaagtatattgaaagtttaaaaaaaaaaaaaaaa

SEQ ID NO: 16 - DNA, 4637 bp, human
aggtgaacaggtcctcacgcccagctccgccccctcacgcgctctcgccgggaccccgcttccgctggcagccatgggccccggccccagccgcgcgccccgcgccccacgcctgatgctctgtgcgctcgccttgatggtggcggccggcggctgcgtcgtctccgccttcaacctggatacccgattcctggtagtgaaggaggccgggaacccgggcagcctcttcggctactcggtcgccctccatcggcagacagagcggcagcagcgctacctgctcctggctggtgccccccgggagctcgctgtgcccgatggctacaccaaccggactggtgctgtgtacctgtgcccactcactgcccacaaggatgactgtgagcggatgaacatcacagtgaaaaatgaccctggccatcacattattgaggacatgtggcttggagtgactgtggccagccagggccctgcaggcagagttctggtctgtgcccaccgctacacccaggtgctgtggtcagggtcagaagaccagcggcgcatggtgggcaagtgctacgtgcgaggcaatgacctagagctggactccagtgatgactggcagacctaccacaacgagatgtgcaatagcaacacagactacctggagacgggcatgtgccagctgggcaccagcggtggcttcacccagaacactgtgtacttcggcgcccccggtgcctacaactggaaaggaaacagctacatgattcagcgcaaggagtgggacttatctgagtatagttacaaggacccagaggaccaaggaaacctctatattgggtacacgatgcaggtaggcagcttcatcctgcaccccaaaaacatcaccattgtgacaggtgccccacggcaccgacatatgggcgcggtgttcttgctgagccaggaggcaggcggagacctgcggaggaggcaggtgctggagggctcgcaggtgggcgcctattttggcagcgcaattgccctggcagacctgaacaatgatgggtggcaggacctcctggtgggcgccccctactacttcgagaggaaagaggaagtagggggtgccatctatgtcttcatgaaccaggcgggaacctccttccctgctcacccctcactccttcttcatggccccagtggctctgcctttggtttatctgtggccagcattggtgacatcaaccaggatggatttcaggatattgctgtgggagctccgtttgaaggcttgggcaaagtgtacatctatcacagtagctctaaggggctccttagacagccccagcaggtaatccatggagagaagctgggactgcctgggttggccaccttcggctattccctcagtgggcagatggatgtggatgagaacttctacccagaccttctagtgggaagcctgtcagaccacattgtgctgctgcgggcccggccagtcatcaacatcgtccacaagaccttggtgcccaggccagctgtgctggaccctgcactttgcacggccacctcttgtgtgcaagtggagctgtgctttgcttacaaccagagtgccgggaaccccaactacaggcgaaacatcaccctggcctacactctggaggctgacagggaccgccggccgccccggctccgctttgccggcagtgagtccgctgtcttccacggcttcttctccatgcccgagatgcgctgccagaagctggagctgctcctgatggacaacctccgtgacaaactccgccccatcatcatctccatgaactactctttacctttgcggatgcccgatcgcccccggctggggctgcggtccctggacgcctacccgatcctcaaccaggcacaggctctggagaaccacactgaggtccagttccagaaggagtgcgggcctgacaacaagtgtgagagcaacttgcagatgcgggcagccttcgtgtcagagcagcagcagaagctgagcaggctccagtacagcagagacgtccggaaattgctcctgagcatcaacgtgacgaacacccggacctcggagcgctccggggaggacgcccacgaggcgctgctcaccctggtggtgcctcccgccctgctgctgtcctcagtgcgcccccccggggcctgccaagctaatgagaccatcttttgcgagctggggaaccccttcaaacggaaccagaggatggagctgctcatcgcctttgaggtcatcggggtgaccctgcacacaagggaccttcaggtgcagctgcagctctccacgtcgagtcaccaggacaacctgtggcccatgatcctcactctgctggtggactatacactccagacctcgcttagcatggtaaatcaccggctacaaagcttctttggggggacagtgatgggtgagtctggcatgaaaactgtggaggatgtaggaagccccctcaagtatgaattccaggtgggcccaatgggggaggggctggtgggcctggggaccctggtcctaggtctggagtggccctacgaagtcagcaatggcaagtggctgctgtatcccacggagatcaccgtccatggcaatgggtcctggccctgccgaccacctggagaccttatcaaccctctcaacctcactctttctgaccctggggacaggccatcatccccacagcgcaggcgccgacagctggatccagggggaggccagggccccccacctgtcactctggctgctgccaaaaaagccaagtctgagactgtgctgacctgtgccacagggcgtgcccactgtgtgtggctagagtgccccatccctgatgcccccgttgtcaccaacgtgactgtgaaggcacgagtgtggaacagcaccttcatcgaggattacagagactttgaccgagtccgggtaaatggctgggctaccctattcctccgaaccagcatccccaccatcaacatggagaacaagaccacgtggttctctgtggacattgactcggagctggtggaggagctgccggccgaaatcgagctgtggctggtgctggtggccgtgggtgcagggctgctgctgctggggctgatcatcctcctgctgtggaagtgcggcttcttcaagcgagcccgcactcgcgccctgtatgaagctaagaggcagaaggcggagatgaagagccagccgtcagagacagagaggctgaccgacgactactgagggggcagccccccgcccccggcccacctggtgtgacttctttaagcggacccgctattatcagatcatgcccaagtaccacgcagtgcggatccgggaggaggagcgctacccacctccagggagcaccctgcccaccaagaagcactgggtgaccagctggcagactcgggaccaatactactgacgtcctccctgatcccaccccctcctcccccagtgtcccctttcttcctatttatcataagttatgcctctgacagtccacaggggccaccacctttggctggtagcagcaggctcaggcacatacacctcgtcaagagcatgcacatgctgtctggccctggggatcttcccacaggagggccagcgctgtggaccttacaacgccgagtgcactgcattcctgtgccctagatgcacgtggggcccactgctcgtggactgtgctggtgcatcacggatggtgcatgggctcgccgtgtctcagcctctgccagcgccagcgccaaaacaagccaaagagcctcccaccagagccgggaggaaaaggcccctgcaatgtggtgacacctcccctttcacacctggatccatcttgagagccacagtcactggattgactttgctgtcaaaactactgacagggagcagcccccgggccgctggctggtgggcccccaattgacacccatgccagagaggtggggatcctgcctaaggttgtctacgggggcacttggaggacctggcgtgctcagacccaacagcaaaggaactagaaagaaggacccagaaggcttgctttcctgcatctctgtgaagcctctctccttggccacagactgaactcgcagggagtgcagcaggaaggaacaaagacaggcaaacggcaacgtagcctgggctcactgtgctggggcatggcgggatcctccacagagaggaggggaccaattctggacagacagatgttgggaggatacagaggagatgccacttctcactcaccactaccagccagcctccagaaggccccagagagaccctgcaagaccacggagggagccgacacttgaatgtagtaataggcagggggccctgccaccccatccagccagaccccagctgaaccatgcgtcaggggcctagaggtggagttcttagctatccttggctttctgtgccagcctggctctgcccctcccccatgggctgtgtcctaaggcccatttgagaagctgaggctagttccaaaaacctctcctgacccctgcctgttggcagcccactccccagccccagccccttccatggtactgtagcaggggaattccctccccctccttgtgccttctttgtatataggcttctcaccgcgaccaataaacagctcccagtttgt

SEQ ID NO: 17 - DNA, 5831 bp, human
gggacctggaagcgccccagccccgcagcgatcgcagattcggctttcaaacaaaagaggcgccccggggggtgggaccgggacctcacccggtcctcgcagagttgcggccgcccgccccttcagccccggctctccgtatgcgcatgagcagaggcgcctccctctgttcctcccaaggctaaactttctaattcccttctttgggctcgggggctcccggagcagggcgagagctcgcgtcgccggaaaggaagacgggaagaaagggcaggcggctcggcgggcgtcttctccactcctctgccgcgtccccgtggctgcagggagccggcatggggcttctccagttgctagctttcagtttcttagccctgtgcagagcccgagtgcgcgctcaggaacccgagttcagctacggctgcgcagaaggcagctgctatcccgccacgggcgaccttctcatcggccgagcacagaagctttcggtgacctcgacgtgcgggctgcacaagcccgaaccctactgtatcgtcagccacttgcaggaggacaaaaaatgcttcatatgcaattcccaagatccttatcatgagaccctgaatcctgacagccatctcattgaaaatgtggtcactacatttgctccaaaccgccttaagatttggtggcaatctgaaaatggtgtggaaaatgtaactatccaactggatttggaagcagaattccattttactcatctcataatgactttcaagacattccgtccagctgctatgctgatagaacgatcgtccgactttgggaaaacctggggtgtgtatagatacttcgcctatgactgtgaggcctcgtttccaggcatttcaactggccccatgaaaaaagtcgatgacataatttgtgattctcgatattctgacattgaaccctcaactgaaggagaggtgatatttcgtgctttagatcctgctttcaaaatagaagatccttatagcccaaggatacagaatttattaaaaattaccaacttgagaatcaagtttgtgaaactgcatactttgggagataaccttctggattccaggatggaaatcagagaaaagtattattatgcagtttatgatatggtggttcgaggaaattgcttctgctatggtcatgccagcgaatgtgcccctgtggatggattcaatgaagaagtggaaggaatggttcacggacactgcatgtgcaggcataacaccaagggcttaaactgtgaactctgcatggatttctaccatgatttaccttggagacctgctgaaggccgaaacagcaacgcctgtaaaaaatgtaactgcaatgaacattccatctcttgtcactttgacatggctgtttacctggccacggggaacgtcagcggaggcgtgtgtgatgactgtcagcacaacaccatggggcgcaactgtgagcagtgcaagccgttttactaccagcacccagagagggacatccgagatcctaatttctgtgaacgatgtacgtgtgacccagctggctctcaaaatgagggaatttgtgacagctatactgatttttctactggtctcattgctggccagtgtcggtgtaaattaaatgtggaaggagaacattgtgatgtttgcaaagaaggcttctatgatttaagcagtgaagatccatttggttgtaaatcttgtgcttgcaatcctctgggaacaattcctggagggaatccttgtgattccgagacaggtcactgctactgcaagcgtctggtgacaggacagcattgtgaccagtgcctgccagagcactggggcttaagcaatgatttggatggatgtcgaccatgtgactgtgaccttgggggagccttaaacaacagttgctttgcggagtcaggccagtgctcatgccggcctcacatgattggacgtcagtgcaacgaagtggaacctggttactactttgccaccctggatcactacctctatgaagcggaggaagccaacttggggcctggggttagcatagtggagcggcaatatatccaggaccggattccctcctggactggagccggcttcgtccgagtgcctgaaggggcttatttggagtttttcattgacaacataccatattccatggagtacgacatcctaattcgctacgagccacagctacccgaccactgggaaaaagctgtcatcacagtgcagcgacctggaaggattccaaccagcagccgatgtggtaataccatccccgatgatgacaaccaggtggtgtcattatcaccaggctcaagatatgtcgtccttcctcggccggtgtgctttgagaagggaacaaactacacggtgaggttggagctgcctcagtacacctcctctgatagcgacgtggagagcccctacacgctgatcgattctcttgttctcatgccatactgtaaatcactggacatcttcaccgtgggaggttcaggagatggggtggtcaccaacagtgcctgggaaacctttcagagataccgatgtctagagaacagcagaagcgttgtgaaaacaccgatgacagatgtttgcagaaacatcatctttagcatttctgccctgttacaccagacaggcctggcttgtgaatgcgaccctcagggttcgttaagttccgtgtgtgatcccaacggaggccagtgccagtgccggcccaacgtggttggaagaacctgcaacagatgtgcacctggaacttttggctttggccccagtggatgcaaaccttgtgagtgccatctgcaaggatctgtcaatgccttctgcaatcccgtcactggccagtgccactgtttccagggagtgtatgctcggcagtgtgatcggtgcttacctgggcactggggctttccaagttgccagccctgccagtgcaatggccacgccgatgactgcgacccagtgactggggagtgcttgaactgccaggactacaccatgggtcataactgtgaaaggtgcttggctggttactatggcgaccccatcattgggtcaggtgatcactgccgcccttgcccttgcccagatggtcccgacagtggacgccagtttgccaggagctgctaccaagatcctgttactttacagcttgcctgtgtttgtgatcctggatacattggttccagatgtgacgactgtgcctcaggatactttggcaatccatcagaagttggggggtcgtgtcagccttgccagtgtcacaacaacattgacacgacagacccagaagcctgtgacaaggagactgggaggtgtctcaagtgcctgtaccacacggaaggggaacactgtcagttctgccggtttggatactatggtgatgccctccggcaggactgtcgaaagtgtgtctgtaattacctgggcaccgtgcaagagcactgtaacggctctgactgccagtgcgacaaagccactggtcagtgcttgtgtcttcctaatgtgatcgggcagaactgtgaccgctgtgcgcccaatacctggcagctggccagtggcactggctgtgacccatgcaactgcaatgctgctcattccttcgggccatcttgcaatgagttcacggggcagtgccagtgcatgcctgggtttggaggccgcacctgcagcgagtgccaggaactcttctggggagaccccgacgtggagtgccgagcctgtgactgtgaccccaggggcattgagacgccacagtgtgaccagtccacgggccagtgtgtctgcgttgagggtgttgagggtccacgctgtgacaagtgcacgcgagggtactcgggggtcttccctgactgcacaccctgccaccagtgctttgctctctgggatgtgatcattgccgagctgaccaacaggacacacagattcctggagaaagccaaggccttgaagatcagtggtgtgatcgggccttaccgtgagactgtggactcggtggagaggaaagtcagcgagataaaagacatcctggcgcagagccccgcagcagagccactgaaaaacattgggaatctctttgaggaagcagagaaactgattaaagatgttacagaaatgatggctcaagtagaagtgaaattatctgacacaacttcccaaagcaacagcacagccaaagaactggattctctacagacagaagccgaaagcctagacaacactgtgaaagaacttgctgaacaactggaatttatcaaaaactcagatattcggggtgccttggatagcattaccaagtatttccagatgtctcttgaggcagaggagagggtgaatgcctccaccacagaacccaacagcactgtggagcagtcagccctcatgagagacagagtagaagacgtgatgatggagcgagaatcccagttcaaggaaaaacaagaggagcaggctcgcctccttgatgaactggcaggcaagctacaaagcctagacctttcagccgctgccgaaatgacctgtggaacacccccaggggcctcctgttccgagactgaatgtggcgggccaaactgcagaactgacgaaggagagaggaagtgtggggggcctggctgtggtggtctggttactgttgcacacaacgcctggcagaaagccatggacttggaccaagatgtcctgagtgccctggctgaagtggaacagctctccaagatggtctctgaagcaaaactgagggcagatgaggcaaaacaaagtgctgaagacattctgttgaagacaaatgctaccaaagaaaaaatggacaagagcaatgaggagctgagaaatctaatcaagcaaatcagaaactttttgacccaggatagtgctgatttggacagcattgaagcagttgctaatgaagtattgaaaatggagatgcctagcaccccacagcagttacagaacttgacagaagatatacgtgaacgagttgaaagcctttctcaagtagaggttattcttcagcatagtgctgctgacattgccagagctgagatgttgttagaagaagctaaaagagcaagcaaaagtgcaacagatgttaaagtcactgcagatatggtaaaggaagctctggaagaagcagaaaaggcccaggtcgcagcagagaaggcaattaaacaagcagatgaagacattcaaggaacccagaacctgttaacttcgattgagtctgaaacagcagcttctgaggaaaccttgttcaacgcgtcccagcgcatcagcgagttagagaggaatgtggaagaacttaagcggaaagctgcccaaaactccggggaggcagaatatattgaaaaagtagtatatactgtgaagcaaagtgcagaagatgttaagaagactttagatggtgaacttgatgaaaagtataaaaaagtagaaaatttaattgccaaaaaaactgaagagtcagctgatgccagaaggaaagccgaaatgctacaaaatgaagcaaaaactcttttagctcaagcaaatagcaagctgcaactgctcaaagatttagaaagaaaatatgaagacaatcaaagatacttagaagataaagctcaagaattagcaagactggaaggagaagtccgttcactcctaaaggatataagccagaaagttgctgtgtatagcacatgcttgtaacagaggagaataaaaaatggctgaggtgaacaaggtaaaacaactacattttaaaaactgacttaatgctcttcaaaataaaacatcacctatttaatgtttttaatcacattttgtatgagttaaataaagccc

SEQ ID NO: 18 - DNA, 552 bp, human
agagacatgtaccttgaccatcgtccttcctctcaagctagcccagagggtgggagcctaaggaagcgtggggtagcagatggagtaatggtcacgaggtccagacccactcccaaagctcagacttgccaggctccctttctcttcttccccaggtccttcctttaggtctggttgttgcaccatctgcttggttggctggcagctgagagccctgctgtgggagagcgaagggggtcaaaggaagacttgaagcacagagggctagggaggtggggtacatttctctgagcagtcagggtgggaagaaagaatgcaagagtggactgaatgtgcctaatggagaagacccacgtgctaggggatgaggggcttcctgggtcctgttcccctaccccatttgtggtcacagccatgaagtcaccgggatgaacctatccttccagtggctcgctccctgtagctctgcctccctctccatatctccttcccctacacctccctccccacacctccctactcccctgggcatcttctggcttgactggatgg

SEQ ID NO: 19 - DNA, 809 bp, human
atgcctgtcttcatcttgaaagaaaagctccaggtcccttctccagccacccagccccaagatggtgatgctgctgctgctgctttccgcactggctggcctcttcggtgcggcagagggacaagcatttcatcttgggaagtgccccaatcctccggtgcaggagaattttgacgtgaataagtatctcggaagatggtacgaaattgagaagatcccaacaacctttgagaatggacgctgcatccaggccaactactcactaatggaaaacggaaagatcaaagtgttaaaccaggagttgagagctgatggaactgtgaatcaaatcgaaggtgaagccaccccagttaacctcacagagcctgccaagctggaagttaagttttcctggtttatgccatcggcaccgtactggatcctggccaccgactatgagaactatgccctcgtgtattcctgtacctgcatcatccaactttttcacgtggattttgcttggatcttggcaagaaaccctaatctccctccagaaacagtggactctctaaaaaatatcctgacttctaataacattgatgtcaagaaaatgacggtcacagaccaggtgaactgccccaagctctcgtaaccaggttctacagggaggctgcacccactccatgttacttctgcttcgctttcccctaccccacccccccccataaagacaaaccaatcaaccacgacaaaggaagttgacctaaacatgtaaccatgccctaccctgttaccttgctagctgcaaaataaacttgttgctgacctgc

SEQ ID NO: 20 - DNA, 7560 bp, human
accggccacagcctgcctactgtcacccgcctctcccgcgcgcagatacacgcccccgcctccgtgggcacaaaggcagcgctgctggggaactcgggggaacgcgcacgtgggaaccgccgcagctccacactccaggtacttcttccaaggacctaggtctctcgcccatcggaaagaaaataattctttcaagaagatcagggacaactgatttgaagtctactctgtgcttctaaatccccaattctgctgaaagtgaatccctagagccctagagccccagcagcacccagccaaacccacctccaccatgggggccatgactcagctgttggcaggtgtctttcttgctttccttgccctcgctaccgaaggtggggtcctcaagaaagtcatccggcacaagcgacagagtggggtgaacgccaccctgccagaagagaaccagccagtggtgtttaaccacgtttacaacatcaagctgccagtgggatcccagtgttcggtggatctggagtcagccagtggggagaaagacctggcaccgccttcagagcccagcgaaagctttcaggagcacacagtagatggggaaaaccagattgtcttcacacatcgcatcaacatcccccgccgggcctgtggctgtgccgcagcccctgatgttaaggagctgctgagcagactggaggagctggagaacctggtgtcttccctgagggagcaatgtactgcaggagcaggctgctgtctccagcctgccacaggccgcttggacaccaggcccttctgtagcggtcggggcaacttcagcactgaaggatgtggctgtgtctgcgaacctggctggaaaggccccaactgctctgagcccgaatgtccaggcaactgtcaccttcgaggccggtgcattgatgggcagtgcatctgtgacgacggcttcacgggcgaggactgcagccagctggcttgccccagcgactgcaatgaccagggcaagtgcgtgaatggagtctgcatctgtttcgaaggctacgccggggctgactgcagccgtgaaatctgcccagtgccctgcagtgaggagcacggcacatgtgtagatggcttgtgtgtgtgccacgatggctttgcaggcgatgactgcaacaagcctctgtgtctcaacaattgctacaaccgtggacgatgcgtggagaatgagtgcgtgtgtgatgagggtttcacgggcgaagactgcagtgagctcatctgccccaatgactgcttcgaccggggccgctgcatcaatggcacctgctactgcgaagaaggcttcacaggtgaagactgcgggaaacccacctgcccacatgcctgccacacccagggccggtgtgaggaggggcagtgtgtatgtgatgagggctttgccggtttggactgcagcgagaagaggtgtcctgctgactgtcacaatcgtggccgctgtgtagacgggcggtgtgagtgtgatgatggtttcactggagctgactgtggggagctcaagtgtcccaatggctgcagtggccatggccgctgtgtcaatgggcagtgtgtgtgtgatgagggctatactggggaggactgcagccagctacggtgccccaatgactgtcacagtcggggccgctgtgtcgagggcaaatgtgtatgtgagcaaggcttcaagggctatgactgcagtgacatgagctgccctaatgactgtcaccagcacggccgctgtgtgaatggcatgtgtgtttgtgatgacggctacacaggggaagactgccgggatcgccaatgccccagggactgcagcaacaggggcctctgtgtggacggacagtgcgtctgtgaggacggcttcaccggccctgactgtgcagaactctcctgtccaaatgactgccatggccagggtcgctgtgtgaatgggcagtgcgtgtgccatgaaggatttatgggcaaagactgcaaggagcaaagatgtcccagtgactgtcatggccagggccgctgcgtggacggccagtgcatctgccacgagggcttcacaggcctggactgtggccagcactcctgccccagtgactgcaacaacttaggacaatgcgtctcgggccgctgcatctgcaacgagggctacagcggagaagactgctcagaggtgtctcctcccaaagacctcgttgtgacagaagtgacggaagagacggtcaacctggcctgggacaatgagatgcgggtcacagagtaccttgtcgtgtacacgcccacccacgagggtggtctggaaatgcagttccgtgtgcctggggaccagacgtccaccatcatccaggagctggagcctggtgtggagtactttatccgtgtatttgccatcctggagaacaagaagagcattcctgtcagcgccagggtggccacgtacttacctgcacctgaaggcctgaaattcaagtccatcaaggagacatctgtggaagtggagtgggatcctctagacattgcttttgaaacctgggagatcatcttccggaatatgaataaagaagatgagggagagatcaccaaaagcctgaggaggccagagacctcttaccggcaaactggtctagctcctgggcaagagtatgagatatctctgcacatagtgaaaaacaatacccggggccctggcctgaagagggtgaccaccacacgcttggatgcccccagccagatcgaggtgaaagatgtcacagacaccactgccttgatcacctggttcaagcccctggctgagatcgatggcattgagctgacctacggcatcaaagacgtgccaggagaccgtaccaccatcgatctcacagaggacgagaaccagtactccatcgggaacctgaagcctgacactgagtacgaggtgtccctcatctcccgcagaggtgacatgtcaagcaacccagccaaagagaccttcacaacaggcctcgatgctcccaggaatcttcgacgtgtttcccagacagataacagcatcaccctggaatggaggaatggcaaggcagctattgacagttacagaattaagtatgcccccatctctggaggggaccacgctgaggttgatgttccaaagagccaacaagccacaaccaaaaccacactcacaggtctgaggccgggaactgaatatgggattggagtttctgctgtgaaggaagacaaggagagcaatccagcgaccatcaacgcagccacagagttggacacgcccaaggaccttcaggtttctgaaactgcagagaccagcctgaccctgctctggaagacaccgttggccaaatttgaccgctaccgcctcaattacagtctccccacaggccagtgggtgggagtgcagcttccaagaaacaccacttcctatgtcctgagaggcctggaaccaggacaggagtacaatgtcctcctgacagccgagaaaggcagacacaagagcaagcccgcacgtgtgaaggcatccactgaacaagcccctgagctggaaaacctcaccgtgactgaggttggctgggatggcctcagactcaactggaccgcggctgaccaggcctatgagcactttatcattcaggtgcaggaggccaacaaggtggaggcagctcggaacctcaccgtgcctggcagccttcgggctgtggacataccgggcctcaaggctgctacgccttatacagtctccatctatggggtgatccagggctatagaacaccagtgctctctgctgaggcctccacaggggaaactcccaatttgggagaggtcgtggtggccgaggtgggctgggatgccctcaaactcaactggactgctccagaaggggcctatgagtactttttcattcaggtgcaggaggctgacacagtagaggcagcccagaacctcaccgtcccaggaggactgaggtccacagacctgcctgggctcaaagcagccactcattataccatcaccatccgcggggtcactcaggacttcagcacaacccctctctctgttgaagtcttgacagaggaggttccagatatgggaaacctcacagtgaccgaggttagctgggatgctctcagactgaactggaccacgccagatggaacctatgaccagtttactattcaggtccaggaggctgaccaggtggaagaggctcacaatctcacggttcctggcagcctgcgttccatggaaatcccaggcctcagggctggcactccttacacagtcaccctgcacggcgaggtcaggggccacagcactcgaccccttgctgtagaggtcgtcacagaggatctcccacagctgggagatttagccgtgtctgaggttggctgggatggcctcagactcaactggaccgcagctgacaatgcctatgagcactttgtcattcaggtgcaggaggtcaacaaagtggaggcagcccagaacctcacgttgcctggcagcctcagggctgtggacatcccgggcctcgaggctgccacgccttatagagtctccatctatggggtgatccggggctatagaacaccagtactctctgctgaggcctccacagccaaagaacctgaaattggaaacttaaatgtttctgacataactcccgagagcttcaatctctcctggatggctaccgatgggatcttcgagacctttaccattgaaattattgattccaataggttgctggagactgtggaatataatatctctggtgctgaacgaactgcccatatctcagggctaccccctagtactgattttattgtctacctctctggacttgctcccagcatccggaccaaaaccatcagtgccacagccacgacagaggccctgccccttctggaaaacctaaccatttccgacattaatccctacgggttcacagtttcctggatggcatcggagaatgcctttgacagctttctagtaacggtggtggattctgggaagctgctggacccccaggaattcacactttcaggaacccagaggaagctggagcttagaggcctcataactggcattggctatgaggttatggtctctggcttcacccaagggcatcaaaccaagcccttgagggctgagattgttacagaagccgaaccggaagttgacaaccttctggtttcagatgccaccccagacggtttccgtctgtcctggacagctgatgaaggggtcttcgacaattttgttctcaaaatcagagataccaaaaagcagtctgagccactggaaataaccctacttgcccccgaacgtaccagggacttaacaggtctcagagaggctactgaatacgaaattgaactctatggaataagcaaaggaaggcgatcccagacagtcagtgctatagcaacaacagccatgggctccccaaaggaagtcattttctcagacatcactgaaaattcggctactgtcagctggagggcacccacggcccaagtggagagcttccggattacctatgtgcccattacaggaggtacaccctccatggtaactgtggacggaaccaagactcagaccaggctggtgaaactcatacctggcgtggagtaccttgtcagcatcatcgccatgaagggctttgaggaaagtgaacctgtctcagggtcattcaccacagctctggatggcccatctggcctggtgacagccaacatcactgactcagaagccttggccaggtggcagccagccattgccactgtggacagttatgtcatctcctacacaggcgagaaagtgccagaaattacacgcacggtgtccgggaacacagtggagtatgctctgaccgacctcgagcctgccacggaatacacactgagaatctttgcagagaaagggccccagaagagctcaaccatcactgccaagttcacaacagacctcgattctccaagagacttgactgctactgaggttcagtcggaaactgccctccttacctggcgacccccccgggcatcagtcaccggttacctgctggtctatgaatcagtggatggcacagtcaaggaagtcattgtgggtccagataccacctcctacagcctggcagacctgagcccatccacccactacacagccaagatccaggcactcaatgggcccctgaggagcaatatgatccagaccatcttcaccacaattggactcctgtaccccttccccaaggactgctcccaagcaatgctgaatggagacacgacctctggcctctacaccatttatctgaatggtgataaggctcaggcgctggaagtcttctgtgacatgacctctgatgggggtggatggattgtgttcctgagacgcaaaaacggacgcgagaacttctaccaaaactggaaggcatatgctgctggatttggggaccgcagagaagaattctggcttgggctggacaacctgaacaaaatcacagcccaggggcagtacgagctccgggtggacctgcgggaccatggggagacagcctttgctgtctatgacaagttcagcgtgggagatgccaagactcgctacaagctgaaggtggaggggtacagtgggacagcaggtgactccatggcctaccacaatggcagatccttctccacctttgacaaggacacagattcagccatcaccaactgtgctctgtcctacaaaggggctttctggtacaggaactgtcaccgtgtcaacctgatggggagatatggggacaataaccacagtcagggcgttaactggttccactggaagggccacgaacactcaatccagtttgctgagatgaagctgagaccaagcaacttcagaaatcttgaaggcaggcgcaaacgggcataaattggagggaccactgggtgagagaggaataaggcggcccagagcgaggaaaggattttaccaaagcatcaatacaaccagcccaaccatcggtccacacctgggcatttggtgagaatcaaagctgaccatggatccctggggccaacggcaacagcatgggcctcacctcctctgtgatttctttctttgcaccaaagacatcagtctccaacatgtttctgttttgttgtttgattcagcaaaaatctcccagtgacaacatcgcaatagttttttacttctcttaggtggctctgggatgggagaggggtaggatgtacaggggtagtttgttttagaaccagccgtattttacatgaagctgtataattaattgtcattatttttgttagcaaagattaaatgtgtcattggaagccatccctttttttacatttcatacaacagaaaccagaaaagcaatactgtttccattttaaggatatgattaatattattaatataataatgatgatgatgatgatgaaaactaaggatttttcaagagatctttctttccaaaacatttctggacagtacctgattgtattttttttttaaataaaagcacaagtacttttgaaaaaaaaccggaattc

SEQ ID NO: 21 - DNA, 1360 bp, human
cgggggttgctccgtccgtgctccgcctcgccatgacttcctacagctatcgccagtcgtcggccacgtcgtccttcggaggcctgggcggcggctccgtgcgttttgggccgggggtcgcttttcgcgcgcccagcattcacgggggctccggcggccgcggcgtatccgtgtcctccgcccgctttgtgtcctcgtcctcctcggggggctacggcggcggctacggcggcgtcctgaccgcgtccgacgggctgctggcgggcaacgagaagctaaccatgcagaacctcaacgaccgcctggcctcctacctggacaaggtgcgcgccctggaggcggccaacggcgagctagaggtgaagatccgcgactggtaccagaagcaggggcctgggccctcccgcgactacagccactactacacgaccatccaggacctgcgggacaagattcttggtgccaccattgagaactccaggattgtcctgcagatcgacaacgcccgtctggctgcagatgacttccgaaccaagtttgagacggaacaggctctgcgcatgagcgtggaggccgacatcaacggcctgcgcagggtgctggatgagctgaccctggccaggaccgacctggagatgcagatcgaaggcctgaaggaagagctggcctacctgaagaagaaccatgaggaggaaatcagtacgctgaggggccaagtgggaggccaggtcagtgtggaggtggattccgctccgggcaccgatctcgccaagatcctgagtgacatgcgaagccaatatgaggtcatggccgagcagaaccggaaggatgctgaagcctggttcaccagccggactgaagaattgaaccgggaggtcgctggccacacggagcagctccagatgagcaggtccgaggttactgacctgcggcgcacccttcagggtcttgagattgagctgcagtcacagctgagcatgaaagctgccttggaagacacactggcagaaacggaggcgcgctttggagcccagctggcgcatatccaggcgctgatcagcggtattgaagcccagctggcggatgtgcgagctgatagtgagcggcagaatcaggagtaccagcggctcatggacatcaagtcgcggctggagcaggagattgccacctaccgcagcctgctcgagggacaggaagatcactacaacaatttgtctgcctccaaggtcctctgaggcagcaggctctggggcttctgctgtcctttggagggtgtcttctgggtagagggatgggaaggaagggacccttacccccggctcttctcctgacctgccaataaaaatttatggtccaaggg

SEQ ID NO: 22 - DNA, 3088 bp, human
acaaaaaagcttttacgaggtatcagcacttttctttcattagggggaaggcgtgaggaaagtaccaaacagcagcggagttttaaactttaaatagacaggtctgagtgcctgaacttgccttttcattttacttcatcctccaaggagttcaatcacttggcgtgacttcactacttttaagcaaaagagtggtgcccaggcaacatgggtgactggagcgccttaggcaaactccttgacaaggttcaagcctactcaactgctggagggaaggtgtggctgtcagtacttttcattttccgaatcctgctgctggggacagcggttgagtcagcctggggagatgagcagtctgcctttcgttgtaacactcagcaacctggttgtgaaaatgtctgctatgacaagtctttcccaatctctcatgtgcgcttctgggtcctgcagatcatatttgtgtctgtacccacactcttgtacctggctcatgtgttctatgtgatgcgaaaggaagagaaactgaacaagaaagaggaagaactcaaggttgcccaaactgatggtgtcaatgtggacatgcacttgaagcagattgagataaagaagttcaagtacggtattgaagagcatggtaaggtgaaaatgcgaggggggttgctgcgaacctacatcatcagtatcctcttcaagtctatctttgaggtggccttcttgctgatccagtggtacatctatggattcagcttgagtgctgtttacacttgcaaaagagatccctgcccacatcaggtggactgtttcctctctcgccccacggagaaaaccatcttcatcatcttcatgctggtggtgtccttggtgtccctggccttgaatatcattgaactcttctatgttttcttcaagggcgttaaggatcgggttaagggaaagagcgacccttaccatgcgaccagtggtgcgctgagccctgccaaagactgtgggtctcaaaaatatgcttatttcaatggctgctcctcaccaaccgctcccctctcgcctatgtctcctcctgggtacaagctggttactggcgacagaaacaattcttcttgccgcaattacaacaagcaagcaagtgagcaaaactgggctaattacagtgcagaacaaaatcgaatggggcaggcgggaagcaccatctctaactcccatgcacagccttttgatttccccgatgataaccagaattctaaaaaactagctgctggacatgaattacagccactagccattgtggaccagcgaccttcaagcagagccagcagtcgtgccagcagcagacctcggcctgatgacctggagatctagatacaggcttgaaagcatcaagattccactcaattgtggagaagaaaaaaggtgctgtagaaagtgcaccaggtgttaattttgatccggtggaggtggtactcaacagccttattcatgaggcttagaaaacacaaagacattagaatacctaggttcactgggggtgtatggggtagatgggtggagagggaggggataagagaggtgcatgttggtatttaaagtagtggattcaaagaacttagattataaataagagttccattaggtgatacatagataagggctttttctccccgcaaacacccctaagaatggttctgtgtatgtgaatgagcgggtggtaattgtggctaaatatttttgttttaccaagaaactgaaataattctggccaggaataaatacttcctgaacatcttaggtcttttcaacaagaaaaagacagaggattgtccttaagtccctgctaaaacattccattgttaaaatttgcactttgaaggtaagctttctaggcctgaccctccaggtgtcaatggacttgtgctactatatttttttattcttggtatcagtttaaaattcagacaaggcccacagaataagattttccatgcatttgcaaatacgtatattctttttccatccacttgcacaatatcattaccatcactttttcatcattcctcagctactactcacattcatttaatggtttctgtaaacatttttaagacagttgggatgtcacttaacattttttttttttgagctaaagtcagggaatcaagccatgcttaatatttaacaatcacttatatgtgtgtcgaagagtttgttttgtttgtcatgtattggtacaagcagatacagtataaactcacaaacacagatttgaaaataatgcacatatggtgttcaaatttgaacctttctcatggatttttgtggtgtgggccaatatggtgtttacattatataattcctgctgtggcaagtaaagcacactttttttttctcctaaaatgtttttccctgtgtatcctattatggatactggttttgttaattatgattctttattttctctcctttttttaggatatagcagtaatgctattactgaaatgaatttcctttttctgaaatgtaatcattgatgcttgaatgatagaattttagtactgtaaacaggctttagtcattaatgtgagagacttagaaaaaatgcttagagtggactattaaatgtgcctaaatgaattttgcagtaactggtattcttgggttttcctacttaatacacagtaattcagaacttgtattctattatgagtttagcagtcttttggagtgaccagcaactttgatgtttgcactaagattttatttggaatgcaagagaggttgaaagaggattcagtagtacacatacaactaatttatttgaactatatgttgaagacatctaccagtttctccaaatgccttttttaaaactcatcacagaagattggtgaaaatgctgagtatgacacttttcttcttgcatgcatgtcagctacataaacagttttgtacaatgaaaattactaatttgtttgacattccatgttaaactacggtcatgttcagcttcattgcatgtaatgtagacctagtccatcagatcatgtgttctggagagtgttctttattcaataaagttttaatttagtataaacat

SEQ ID NO: 23 - DNA, 1717 bp, human
gtggattcttgtccatagtgcatctgctttaagaattaacgaaagcagtgtcaagacagtaaggattcaaaccatttgccaaaaatgagtctaagtgcatttactctcttcctggcattgattggtggtaccagtggccagtactatgattatgattttcccctatcaatttatgggcaatcatcaccaaactgtgcaccagaatgtaactgccctgaaagctacccaagtgccatgtactgtgatgagctgaaattgaaaagtgtaccaatggtgcctcctggaatcaagtatctttaccttaggaataaccagattgaccatattgatgaaaaggcctttgagaatgtaactgatctgcagtggctcattctagatcacaaccttctagaaaactccaagataaaagggagagttttctctaaattgaaacaactgaagaagctgcatataaaccacaacaacctgacagagtctgtgggcccacttcccaaatctctggaggatctgcagcttactcataacaagatcacaaagctgggctcttttgaaggattggtaaacctgaccttcatccatctccagcacaatcggctgaaagaggatgctgtttcagctgcttttaaaggtcttaaatcactcgaataccttgacttgagcttcaatcagatagccagactgccttctggtctccctgtctctcttctaactctctacttagacaacaataagatcagcaacatccctgatgagtatttcaagcgttttaatgcattgcagtatctgcgtttatctcacaacgaactggctgatagtggaatacctggaaattctttcaatgtgtcatccctggttgagctggatctgtcctataacaagcttaaaaacataccaactgtcaatgaaaaccttgaaaactattacctggaggtcaatcaacttgagaagtttgacataaagagcttctgcaagatcctggggccattatcctactccaagatcaagcatttgcgtttggatggcaatcgcatctcagaaaccagtcttccaccggatatgtatgaatgtctacgtgttgctaacgaagtcactcttaattaatatctgtatcctggaacaatattttatggttatgtttttctgtgtgtcagttttcatagtatccatattttattactgtttattacttccatgaattttaaaatctgagggaaatgttttgtaaacatttattttttttaaagaaaagatgaaaggcaggcctatttcatcacaagaacacacacatatacacgaatagacatcaaactcaatgctttatttgtaaatttagtgtttttttatttctactgtcaaatgatgtgcaaaaccttttactggttgcatggaaatcagccaagttttataatccttaaatcttaatgttcctcaaagcttggattaaatacatatggatgttactctcttgcaccaaattatcttgatacattcaaatttgtctggtaaaaaaataggtggtagatattgaggccaagaatattgcaaaatacatgaagcttcatgcacttaaagaagtatttttagaataagaatttgcatacttacctagtgaaacttttctagaattatttttcactctaagtcatgtatgtttctctttgattatttgcatgttatgtttaataagctactagcaaaataaaacatagcaaatggc

SEQ ID NO: 24 - DNA, 3935 bp, human
tccctcgctcaccccatcctctctcccgccccttcctggattccctcacccgtctcgatcccctctccgccctttcccagagacccagagcccctgaccccccgcgccctccccggagccccccgcgcgtgccgcggccatggcggccgtgcgcggggcgcccctgctcagctgcctcctggcgttgctggccctgtgccctggagggcgcccgcagacggtgctgaccgacgacgagatcgaggagttcctcgagggcttcctgtcagagctagaacctgagccccgggaggacgacgtggaggccccgccgcctcccgagcccaccccgcgggtccgaaaagcccaggcggggggcaagccagggaagcggccagggacggccgcagaagtgcctccggaaaagaccaaagacaaagggaagaaaggcaagaaagacaaaggccccaaggtgcccaaggagtccttggaggggtcccccaggccgcccaagaaggggaaggagaagccacccaaggccaccaagaagcccaaggagaagccacctaaggccaccaagaagcccaaggaggagccacccaaggccaccaagaagcccaaagagaagccacccaaggccaccaagaagcccccgtcagggaagaggccccccattctggctccctcagaaaccctggagtggccactgcccccaccccccagccctggccccgaggagctaccccaggagggaggggcgcccctctcaaataactggcagaatccaggagaggagacccatgtggaggcacaggagcaccagcctgagccggaggaggagaccgagcaacccacactggactacaatgaccagatcgagagggaggactatgaggactttgagtacattcggcgccagaagcaacccaggccacccccaagcagaaggaggaggcccgagcgggtctggccagagccccctgaggagaaggccccggccccagccccggaggagaggattgagcctcctgtgaagcctctgctgcccccgctgccccctgactatggtgatggttacgtgatccccaactacgatgacatggactattactttgggcctcctccgccccagaagcccgatgctgagcgccagacggacgaagagaaggaggagctgaagaaacccaaaaaggaggacagcagccccaaggaggagaccgacaagtgggcagtggagaagggcaaggaccacaaagagccccgaaagggcgaggagttggaggaggagtggacgcctacggagaaagtcaagtgtccccccattgggatggagtcacaccgtattgaggacaaccagatccgagcctcctccatgctgcgccacggcctgggggcacagcgcggccggctcaacatgcagaccggtgccactgaggacgactactatgatggtgcgtggtgtgccgaggacgatgccaggacccagtggatagaggtggacaccaggaggactacccggttcacaggcgtcatcacccagggcagagactccagcatccatgacgattttgtgaccaccttcttcgtgggcttcagcaatgacagccagacatgggtgatgtacaccaacggctatgaggaaatgacctttcatgggaacgtggacaaggacacacccgtgctgagtgagctcccagagccggtggtggctcgtttcatccgcatctacccactcacctggaatggcagcctgtgcatgcgcctggaggtgctggggtgctctgtggcccctgtctacagctactacgcacagaatgaggtggtggccaccgatgacctggatttccggcaccacagctacaaggacatgcgccagctcatgaaggtggtgaacgaggagtgccccaccatcacccgcacttacagcctgggcaagagctcacgaggcctcaagatctatgccatggagatctcagacaaccctggggagcatgaactgggggagcccgagttccgctacactgctgggatccatggcaacgaggtgctgggccgagagctgttgctgctgctcatgcagtacctgtgccgagagtaccgcgatgggaacccacgtgtgcgcagcctggtgcaggacacacgcatccacctggtgccctcactgaaccctgatggctacgaggtggcagcgcagatgggctcagagtttgggaactgggcgctgggactgtggactgaggagggctttgacatctttgaagatttcccggatctcaactctgtgctctggggagctgaggagaggaaatgggtcccctaccgggtccccaacaataacttgcccatccctgaacgctacctttcgccagatgccacggtatccacggaggtccgggccatcattgcctggatggagaagaaccccttcgtgctgggagcaaatctgaacggcggcgagcggctagtatcctacccctacgatatggcccgcacgcctacccaggagcagctgctggccgcagccatggcagcagcccggggggaggatgaggacgaggtctccgaggcccaggagactccagaccacgccatcttccggtggcttgccatctccttcgcctccgcacacctcaccttgaccgagccctaccgcggaggctgccaagcccaggactacaccggcggcatgggcatcgtcaacggggccaagtggaacccccggaccgggactatcaatgacttcagttacctgcataccaactgcctggagctctccttctacctgggctgtgacaagttccctcatgagagtgagctgccccgcgagtgggagaacaacaaggaggcgctgctcaccttcatggagcaggtgcaccgcggcattaagggggtggtgacggacgagcaaggcatccccattgccaacgccaccatctctgtgagtggcattaatcacggcgtgaagacagccagtggtggtgattactggcgaatcttgaacccgggtgagtaccgcgtgacagcccacgcggagggctacaccccgagcgccaagacctgcaatgttgactatgacatcggggccactcagtgcaacttcatcctggctcgctccaactggaagcgcatccgggagatcatggccatgaacgggaaccggcctatcccacacatagacccatcgcgccctatgaccccccaacagcgacgcctgcagcagcgacgcctacaacaccgcctgcggcttcgggcacagatgcggctgcggcgcctcaacgccaccaccaccctaggcccccacactgtgcctcccacgctgccccctgcccctgccaccaccctgagcactaccatagagccctggggcctcataccgccaaccaccgctggctgggaggagtcggagactgagacctacacagaggtggtgacagagtttgggaccgaggtggagcccgagtttgggaccaaggtggagcccgagtttgagacccagttggagcctgagttcgagacccagctggaacccgagtttgaggaagaggaggaggaggagaaagaggaggagatagccactggccaggcattccccttcacaacagtagagacctacacagtgaactttggggacttctgagatcagcgtcctaccaagaccccagcccaactcaagctacagcagcagcacttcccaagcctgctgaccacagtcacatcacccatcagcacatggaaggcccctggtatggacactgaaaggaagggctggtcctgcccctttgagggggtgcaaacatgactgggacctaagagccagaggctgtgtagaggctcctgctccacctgccagtctcgtaagagatggggttgctgcagtgttggagtaggggcagagggagggagccaaggtcactccaataaaacaagctcatggcaaaaaaaaaaaaaaaaaaaaa

SEQ ID NO: 25 - DNA, 704 bp, human
  misc_feature (548)..(548): n is a, c, g, or t
tttttttttttttttttgttgggatttcagatagagtttggtttataaaaagcaaacagggccaacgtccacaccaaattcttgatcaggaccaccaatgtcatagggtgcaatatctacaataggtagtctcacagccttgcgtgttcgatattcaaagactgttttgctccattccccagtgtgtttcgtgcaaccatcctccagaactgtgtaggtgaatttgctatttccttcagccttgaattcaccttcatttgaccccatcagcttcagggccttctttacatttccactggcctgatccatgtatgcaatgctatttttgcagtgatatgtgatgttctgggaagctcggctggagagaagtcgaaggaatgccagctgcacatcaaggacatcttcaggaagttcaggattgccgtagctaaactgaaaaccaccatccatggactctccaaaccaaacgtgtttcttctcagcactagaatctgtccaccagtgtttccgtggaacattcaaaggattggcacttatgcatgtttccncagtgtccatattacagaataccttgatagcatccaatatgcatccttgggtagggtcaactcagtattcttcactcttgagttcaggatggcagaatttcaggtctctgcagattctaacggggttttacgagaacatcaggactaatgaggctt

SEQ ID NO: 26 - DNA, 1080 bp, human
atgaaggccactatcatcctccttctgcttgcacaagtttcctgggctggaccgtttcaacagagaggcttatttgactttatgctagaagatgaggcttctgggataggcccagaagttcctgatgaccgcgacttcgagccctccctaggcccagtgtgccccttccgctgtcaatgccatcttcgagtggtccagtgttctgatttgggtctggacaaagtgccaaaggatcttccccctgacacaactctgctagacctgcaaaacaacaaaataaccgaaatcaaagatggagactttaagaacctgaagaaccttcacgcattgattcttgtcaacaataaaattagcaaagttagtcctggagcatttacacctttggtgaagttggaacgactttatctgtccaagaatcagctgaaggaattgccagaaaaaatgcccaaaactcttcaggagctgcgtgcccatgagaatgagatcaccaaagtgcgaaaagttactttcaatggactgaaccagatgattgtcatagaactgggcaccaatccgctgaagagctcaggaattgaaaatggggctttccagggaatgaagaagctctcctacatccgcattgctgataccaatatcaccagcattcctcaaggtcttcctccttcccttacggaattacatcttgatggcaacaaaatcagcagagttgatgcagctagcctgaaaggactgaataatttggctaagttgggattgagtttcaacagcatctctgctgttgacaatggctctctggccaacacgcctcatctgagggagcttcacttggacaacaacaagcttaccagagtacctggtgggctggcagagcataagtacatccaggttgtctaccttcataacaacaatatctctgtagttggatcaagtgacttctgcccacctggacacaacaccaaaaaggcttcttattcgggtgtgagtcttttcagcaacccggtccagtactgggagatacagccatccaccttcagatgtgtctacgtgcgctctgccattcaactcggaaactataagtaa

SEQ ID NO: 27 - DNA, 684 bp, human
tttttttcaatttttcctctttgaaagataaatttctgctcaaagggacaatattcttgctggatgcgtttctgtaaatgcttcacagtttgaagacaaaggaatgcaacttcccaaaatgtgcccgaggtggaagtacttcctggctagtcggtgtaaacgttgcaaaaccagtctgtgggtctaagagctaatgcgggcatggctgttgggatggaggacctgctgtggcttggtcctgggtatcgaaagagtctggatttttagggctcatactatcctccgtggtcatgctccaataaattcactgctttgtggcgcgacccttaggtattctgcattttcagctgtggagcccttaaagatgccatttggcttggcttccttgggaaagaagtcctgctggtagtcagggttgtccaggctaatttggtggctgcctttctgggcccagtgggcagggctgtcgaatgtgctgttgacacaggtgggctggacagtgttgagatactcagggttgcccactgcagtgctgtgggggtcctggtagtgtgggtctctgctgagcgcggtgttcagaggctgattgtgatagacaggattctgcacagagccagcgggcactttgggaacggactgggatatgtattcagggcctgggaagaaggtgtcgtctatgctttc

SEQ ID NO: 28 - DNA, 544 bp, human
  misc_feature (525)..(525): n is a, c, g, or t
atttatttatttatttttagcaagaatgtacaattctttttgcaattttttgctaacaaaagacaaaaagaaatagtgctcccttcaatttagtagcaataaaatcatctatcttcatctctctcagagggcttagggagagtgaaaggaattagaggaacataaaccatgggtccttcaggtaaaataagtcatttcatagtgatggaggcaacagcaggctacgctcttgtctgcctgtacgctcagcatcagcatgccctgcccctcctcctcccacataaggtgcaccaaagccttcttttcttctacaacagagtcttccggtataaaggtggcaacagaaaattgttgctttgtccttttggggcatctcttgcatctcctgcttgttttgcttttggggtactataacttgtctctttccatttcacaactagtatcctttccacgatattccataacttcgctacttcatctctgaccttttcactggccttctttccaacatgatccaatgtaccnggtacatgtatattccggt

SEQ ID NO: 29 - DNA, 3917 bp, human
tagtcggagcgaggtggcgagtcgctgagcccgccgcggccccgagagcggctgcagccgccgccgccgggaaggagagggcgaggcgcgcccgagccgccgccgccgccgccaccgccgccgccgccaccaccgccaccggagtcgcgggccagccgggcagcctccgcgggccccggccggggcggggggcgcgggccacaggcccctgctccggccgtcgtttgcagaccgcgggcgccgatgtcgcccgcgccccgttaggatgagtctcgggtcgggcgaggagccgccgcagccgccgccgcccgagccgcgggcaggagcctcgggagccgccgccgccgccgccgccgcccggccgggccccgacgccgcccgcgcgcccccgggcccccgacacacatgagattcttcaggctcactttcaagtgcttcgtggactgcttctgactgcgccgcccgcgccccgcaccccgccgtccgcccgccgccccgtcccccggcccggccgccccccggcccccggccggcccgcgccctcggggccctccccggtgccgccggtgccccccgcctgaccgccgccccccgtgaggcgccgcgaccccggcccggccgtgcggcccgccggggccatggcgaagaagagcgccgagaacggcatctatagcgtgtccggcgacgagaagaagggccccctcatcgcgcccgggcccgacggggccccggccaagggcgacggccccgtgggcctggggacacccggcggccgcctggccgtgccgccgcgcgagacctggacgcgccagatggacttcatcatgtcgtgcgtgggcttcgccgtgggcttgggcaacgtgtggcgcttcccctacctgtgctacaagaacggcggaggtgtgttccttattccctacgtcctgatcgccctggttggaggaatccccattttcttcttagagatctcgctgggccagttcatgaaggccggcagcatcaatgtctggaacatctgtcccctgttcaaaggcctgggctacgcctccatggtgatcgtcttctactgcaacacctactacatcatggtgctggcctggggcttctattacctggtcaagtcctttaccaccacgctgccctgggccacatgtggccacacctggaacactcccgactgcgtggagatcttccgccatgaagactgtgccaatgccagcctggccaacctcacctgtgaccagcttgctgaccgccggtcccctgtcatcgagttctgggagaacaaagtcttgaggctgtctgggggactggaggtgccaggggccctcaactgggaggtgaccctttgtctgctggcctgctgggtgctggtctacttctgtgtctggaagggggtcaaatccacgggaaagatcgtgtacttcactgctacattcccctacgtggtcctggtcgtgctgctggtgcgtggagtgctgctgcctggcgccctggatggcatcatttactatctcaagcctgactggtcaaagctggggtcccctcaggtgtggatagatgcggggacccagattttcttttcttacgccattggcctgggggccctcacagccctgggcagctacaaccgcttcaacaacaactgctacaaggacgccatcatcctggctctcatcaacagtgggaccagcttctttgctggcttcgtggtcttctccatcctgggcttcatggctgcagagcagggcgtgcacatctccaaggtggcagagtcagggccgggcctggccttcatcgcctacccgcgggctgtcacgctgatgccagtggccccactctgggctgccctgttcttcttcatgctgttgctgcttggtctcgacagccagtttgtaggtgtggagggcttcatcaccggcctcctcgacctcctcccggcctcctactacttccgtttccaaagggagatctctgtggccctctgttgtgccctctgctttgtcatcgatctctccatggtgactgatggcgggatgtacgtcttccagctgtttgactactactcggccagcggcaccaccctgctctggcaggccttttgggagtgcgtggtggtggcctgggtgtacggagctgaccgcttcatggacgacattgcctgtatgatcgggtaccgaccttgcccctggatgaaatggtgctggtccttcttcaccccgctggtctgcatgggcatcttcatcttcaacgttgtgtactacgagccgctggtctacaacaacacctacgtgtacccgtggtggggtgaggccatgggctgggccttcgccctgtcctccatgctgtgcgtgccgctgcacctcctgggctgcctcctcagggccaagggcaccatggctgagcgctggcagcacctgacccagcccatctggggcctccaccacttggagtaccgagctcaggacgcagatgtcaggggcctgaccaccctgaccccagtgtccgagagcagcaaggtcgtcgtggtggagagtgtcatgtgacaactcagctcacatcaccagctcacctctggtagccatagcagcccctgcttcagccccaccgcacccctccagggggcctgcctttccctgacacttttggggtctgcctgggggaggaggggagaaagcaccatgagtgctcactaaaacaactttttccatttttaataaaacgccaaaaatatcacaacccaccaaaaatagatgcctctccccctccagccctagccgagctggtcctaggccccgcctagtgccccacccccacccacagtgctgcactcctcctgcccctgccacgcccaccccctgcccacctctccaggctctgctctgcagcacacccgtgggtgacccctcaccccagaagcagcagtggcagcttgggaaatgtgaggaagggaaggagggagagacgggagggaggagagagaggagaagggaggcaggggaggggcagcagaaccaaggcaaatatttcagctgggctatacccctctccccatccctgttatagaagcttagagagccagccagcaatggaaccttctggttcctgcgccaatcgccaccagtatcaattgtgtgagcttgggtgcgagtgcacgcgtgcgtgagtacggagagtatatatagatctctatctcttagcaaaggtgaatgccagatgtaaatggcgcctctgggcaaaggaggcttgtattttgcacattttataaaaacttgagagaatgagatttctgcttgtatatttctaaaaagaggaaggagcccaaaccatcctctccttaccactcccatccctgtgagccctaccttacccctctgcccctagccaaggagtgtgaatttatagatctaactttcataggcaaaacaaaagcttcgagctgttgcgtgtgtgagtctgttgtgtggatgtgcgtgtgtggtccccagccccagactggattggaaaagtgcatggtgggggcctcggggctgtccccacgctgtccctttgccacaagtctgtggggcaagaggctgcaatattccgtcctgggtgtctgggctgctaacctggcctgctcaggcttcccaccctgtgcggggcacacccccaggaagggaccctggacacggctcccacgtccaggcttaaggtggatgcacttcccgcacctccagtcttctgtgtagcagctttaacccacgtttgtctgtcacgtccagtcccgagacggctgagtgaccccaagaaaggcttccccgacacccagacagaggctgcagggctggggctgggtgagggtggcgggcctgcggggacattctactgtgctaaaaagccactgcagacatagcaataaaaacatgtcattttcc

SEQ ID NO: 30 - DNA, 952 bp, human
tgaactctggatgctgttagcctgagactcaggaagacaacttctgcagggtcactccctggcttctggaggaaagagaaggagggcagtgctccagtggtacagaagtgagacataatggaatcaggcttcacctccaaggacacctatctaagccattttaaccctcgggattacctagaaaaatattacaagtttggttctaggcactctgcagaaagccagattcttaagcaccttctgaaaaatcttttcaagatattctgcctagacggtgtgaagggagacctgctgattgacatcggctctggccccactatctatcagctcctctctgcttgtgaatcctttaaggagatcgtcgtcactgactactcagaccagaacctgcaggagctggagaagtggctgaagaaagagccagaggcctttgactggtccccagtggtgacctatgtgtgtgatcttgaagggaacagagtcaagggtccagagaaggaggagaagttgagacaggcggtcaagcaggtgctgaagtgtgatgtgactcagagccagccactgggggccgtccccttacccccggctgactgcgtgctcagcacactgtgtctggatgccgcctgcccagacctccccacctactgcagggcgctcaggaacctcggcagcctactgaagccagggggcttcctggtgatcatggatgcgctcaagagcagctactacatgattggtgagcagaagttctccagcctccccctgggccgggaggcagtagaggctgctgtgaaagaggctggctacacaatcgaatggtttgaggtgatctcgcaaagttattcttccaccatggccaacaacgaaggacttttctccctggtggcgaggaagctgagcagacccctgtgatgcctgtgacctcaattaaagcaattcctttgacctgtca

SEQ ID NO: 31 - DNA, 2259 bp, human
gttctccccttcccggctttcggtccggaggaggcgggagcagcttccctgttctgatcctatcgcgggcggcgcagggccggcttggccttccgtgggacggggaggggggcgggatgtgtcacccaaataccagtggggacggtcggtggtggaaccagccgggcaggtcgggtagagtataagagccggagggagcggccgggcggcagacgcctgcagaccatcccagacgccggagcccgagccccgccgagtccccgcgcctcatccgcccgcgtccggtccgcgttcctccgccccaccatggctcggggccccggcctcgcgccgccaccgctgcggctgccgctgctgctgctggtgctggcggcggtgaccggccacacggccgcgcaggacaactgcacgtgtcccaccaacaagatgaccgtgtgcagccccgacggccccggcggccgctgccagtgccgcgcgctgggctcgggcatggcggtcgactgctccacgctgacctccaagtgtctgctgctcaaggcgcgcatgagcgcccccaagaacgcccgcacgctggtgcggccgagtgagcacgcgctcgtggacaacgatggcctctacgaccccgactgcgaccccgagggccgcttcaaggcgcgccagtgcaaccagacgtcggtgtgctggtgcgtgaactcggtgggcgtgcgccgcacggacaagggcgacctgagcctacgctgcgatgacctggtgcgcacccaccacatcctcattgacctgcgccaccgccccaccgccggcgccttcaaccactcagacctggacgccgagctgaggcggctcttccgcgagcgctatcggctgcaccccaagttcgtggcggccgtgcactacgagcagcccaccatccagatcgagctgcggcagaacacgtctcagaaggccgccggtgaagtggatatcggcgatgccgcctactacttcgagagggacatcaagggcgagtctctattccagggccgcggcggcctggacttgcgcgtgcgcggagaacccctgcaggtggagcgcacgctcatctattacctggacgagattcccccgaagttctccatgaagcgcctcaccgccggcctcatcgccgtcatcgtggtggtcgtggtggccctcgtcgccggcatggccgtcctggtgatcaccaaccggagaaagtcggggaagtacaagaaggtggagatcaaggaactgggggagttgagaaaggaaccgagcttgtaggtacccggcggggcaggggatggggtggggtaccggatttcggtatcgtcccagacccaagtgagtcacgcttcctgattcctcggcgcaaaggagacgtttatcctttcaaattcctgccttccccctcccttttgcgcacacaccaggtttaatagatcctggcctcagggtctcctttctttctcacttctgtcttgaaggaagcatttctaaaatgtatcccctttcggtccaacaacaggaaacctgactggggcagtgaaggaagggatggcacagcgttatgtgtaaaaaacaagtatctgtatgacaacccgggatcgtttgcaagtaactgaatccattgcgacattgtgaaggcttaaatgagtttagatgggaaatagcgttgttatcgccttgggtttaaattatttgatgagttccacttgtatcatggcctacccgaggagaagaggagtttgttaactgggcctatgtagtagcctcatttaccatcgtttgtattactgaccacatatgcttgtcactgggaaagaagcctgtttcagctgcctgaacgcagtttggatgtctttgaggacagacattgcccggaaactcagtctatttattcttcagcttgcccttactaccactgatattggtaatgttcttttttgtaaaatgtttgtacatatgttgtctttgataatgttgctgtaattttttaaaataaaacacgaatttaataaaatatgggaaaggcacaaaccagaagttggcatttgtgaaaagtccctccagatttctatcactttggtctctaatttcccaagacttgtattttttttttatttcaaattataacacttttttttcccccagaagtgggtgtttcatgttgctactctggtgtgtcccaagatatcctaactggccagtgtaaatgctattctttctaaataagattatttggaaacttccttcaaactgcag

SEQ ID NO: 32 - DNA, 603 bp, human
cgtgctgctacacaagaaccctgagactgacctgcaggacgaaaccatgaagagcctgatccttcttgccatcctggccgccttagcggtagtaactttgtgttatgaatcacatgaaagcatggaatcttatgaacttaatcccttcattaacaggagaaatgcaaataccttcatatcccctcagcagagatggagagctaaagtccaagagaggatccgagaacgctctaagcctgtccacgagctcaatagggaagcctgtgatgactacagactttgcgaacgctacgccatggtttatggatacaatgctgcctataatcgctacttcaggaagcgccgaggggccaaatgagactgagggaagaaaaaaaatctctttttttctggaggctggcacctgattttgtatccccctgtagcagcattactgaaatacataggcttatatacaatgcttctttcctgtatattctcttgtctggctgcacccctttttcccgcccccagattgataagtaatgaaagtgcactgcagtgagggtcaaaggagagtcaacatatgtgattgttccataataaacttctggtgtgatactt

SEQ ID NO: 33 - DNA, 6728 bp, human
agcagacgggagtttctcctcggggtcggagcaggaggcacgcggagtgtgaggccacgcatgagcggacgctaaccccctccccagccacaaagagtctacatgtctagggtctagacatgttcagctttgtggacctccggctcctgctcctcttagcggccaccgccctcctgacgcacggccaagaggaaggccaagtcgagggccaagacgaagacatcccaccaatcacctgcgtacagaacggcctcaggtaccatgaccgagacgtgtggaaacccgagccctgccggatctgcgtctgcgacaacggcaaggtgttgtgcgatgacgtgatctgtgacgagaccaagaactgccccggcgccgaagtccccgagggcgagtgctgtcccgtctgccccgacggctcagagtcacccaccgaccaagaaaccaccggcgtcgagggacccaagggagacactggcccccgaggcccaaggggacccgcaggcccccctggccgagatggcatccctggacagcctggacttcccggaccccccggaccccccggacctcccggaccccctggcctcggaggaaactttgctccccagctgtcttatggctatgatgagaaatcaaccggaggaatttccgtgcctggccccatgggtccctctggtcctcgtggtctccctggcccccctggtgcacctggtccccaaggcttccaaggtccccctggtgagcctggcgagcctggagcttcaggtcccatgggtccccgaggtcccccaggtccccctggaaagaatggagatgatggggaagctggaaaacctggtcgtcctggtgagcgtgggcctcctgggcctcagggtgctcgaggattgcccggaacagctggcctccctggaatgaagggacacagaggtttcagtggtttggatggtgccaagggagatgctggtcctgctggtcctaagggtgagcctggcagccctggtgaaaatggagctcctggtcagatgggcccccgtggcctgcctggtgagagaggtcgccctggagcccctggccctgctggtgctcgtggaaatgatggtgctactggtgctgccgggccccctggtcccaccggccccgctggtcctcctggcttccctggtgctgttggtgctaagggtgaagctggtccccaagggccccgaggctctgaaggtccccagggtgtgcgtggtgagcctggcccccctggccctgctggtgctgctggccctgctggaaaccctggtgctgatggacagcctggtgctaaaggtgccaatggtgctcctggtattgctggtgctcctggcttccctggtgcccgaggcccctctggaccccagggccccggcggccctcctggtcccaagggtaacagcggtgaacctggtgctcctggcagcaaaggagacactggtgctaagggagagcctggccctgttggtgttcaaggaccccctggccctgctggagaggaaggaaagcgaggagctcgaggtgaacccggacccactggcctgcccggaccccctggcgagcgtggtggacctggtagccgtggtttccctggcgcagatggtgttgctggtcccaagggtcccgctggtgaacgtggttctcctggccccgctggccccaaaggatctcctggtgaagctggtcgtcccggtgaagctggtctgcctggtgccaagggtctgactggaagccctggcagccctggtcctgatggcaaaactggcccccctggtcccgccggtcaagatggtcgccccggacccccaggcccacctggtgcccgtggtcaggctggtgtgatgggattccctggacctaaaggtgctgctggagagcccggcaaggctggagagcgaggtgttcccggaccccctggcgctgtcggtcctgctggcaaagatggagaggctggagctcagggaccccctggccctgctggtcccgctggcgagagaggtgaacaaggccctgctggctcccccggattccagggtctccctggtcctgctggtcctccaggtgaagcaggcaaacctggtgaacagggtgttcctggagaccttggcgcccctggcccctctggagcaagaggcgagagaggtttccctggcgagcgtggtgtgcaaggtccccctggtcctgctggaccccgaggggccaacggtgctcccggcaacgatggtgctaagggtgatgctggtgcccctggagctcccggtagccagggcgcccctggccttcagggaatgcctggtgaacgtggtgcagctggtcttccagggcctaagggtgacagaggtgatgctggtcccaaaggtgctgatggctctcctggcaaagatggcgtccgtggtctgaccggccccattggtcctcctggccctgctggtgcccctggtgacaagggtgaaagtggtcccagcggccctgctggtcccactggagctcgtggtgcccccggagaccgtggtgagcctggtccccccggccctgctggctttgctggcccccctggtgctgacggccaacctggtgctaaaggcgaacctggtgatgctggtgccaaaggcgatgctggtccccctgggcctgccggacccgctggaccccctggccccattggtaatgttggtgctcctggagccaaaggtgctcgcggcagcgctggtccccctggtgctactggtttccctggtgctgctggccgagtcggtcctcctggcccctctggaaatgctggaccccctggccctcctggtcctgctggcaaagaaggcggcaaaggtccccgtggtgagactggccctgctggacgtcctggtgaagttggtccccctggtccccctggccctgctggcgagaaaggatcccctggtgctgatggtcctgctggtgctcctggtactcccgggcctcaaggtattgctggacagcgtggtgtggtcggcctgcctggtcagagaggagagagaggcttccctggtcttcctggcccctctggtgaacctggcaaacaaggtccctctggagcaagtggtgaacgtggtccccccggtcccatgggcccccctggattggctggaccccctggtgaatctggacgtgagggggctcctgctgccgaaggttcccctggacgagacggttctcctggcgccaagggtgaccgtggtgagaccggccccgctggaccccctggtgctcctggtgctcctggtgcccctggccccgttggccctgctggcaagagtggtgatcgtggtgagactggtcctgctggtcccgccggtcccgtcggccccgtcggcgcccgtggccccgccggaccccaaggcccccgtggtgacaagggtgagacaggcgaacagggcgacagaggcataaagggtcaccgtggcttctctggcctccagggtccccctggccctcctggctctcctggtgaacaaggtccctctggagcctctggtcctgctggtccccgaggtccccctggctctgctggtgctcctggcaaagatggactcaacggtctccctggccccattgggccccctggtcctcgcggtcgcactggtgatgctggtcctgttggtccccccggccctcctggacctcctggtccccctggtcctcccagcgctggtttcgacttcagcttcctgccccagccacctcaagagaaggctcacgatggtggccgctactaccgggctgatgatgccaatgtggttcgtgaccgtgacctcgaggtggacaccaccctcaagagcctgagccagcagatcgagaacatccggagcccagagggaagccgcaagaaccccgcccgcacctgccgtgacctcaagatgtgccactctgactggaagagtggagagtactggattgaccccaaccaaggctgcaacctggatgccatcaaagtcttctgcaacatggagactggtgagacctgcgtgtaccccactcagcccagtgtggcccagaagaactggtacatcagcaagaaccccaaggacaagaggcatgtctggttcggcgagagcatgaccgatggattccagttcgagtatggcggccagggctccgaccctgccgatgtggccatccagctgaccttcctgcgcctgatgtccaccgaggcctcccagaacatcacctaccactgcaagaacagcgtggcctacatggaccagcagactggcaacctcaagaaggccctgctcctcaagggctccaacgagatcgagatccgcgccgagggcaacagccgcttcacctacagcgtcactgtcgatggctgcacgagtcacaccggagcctggggcaagacagtgattgaatacaaaaccaccaagtcctcccgcctgcccatcatcgatgtggcccccttggacgttggtgccccagaccaggaattcggcttcgacgttggccctgtctgcttcctgtaaactccctccatcccaacctggctccctcccacccaaccaactttccccccaacccggaaacagacaagcaacccaaactgaacccccccaaaagccaaaaaatgggagacaatttcacatggactttggaaaatatttttttcctttgcattcatctctcaaacttagtttttatctttgaccaaccgaacatgaccaaaaaccaaaagtgcattcaaccttaccaaaaaaaaaaaaaaaaaaaaaagaataaataaataagtttttaaaaaaggaagcttggtccacttgcttgaagacccatgcgggggtaagtccctttctgcccgttgggttatgaaaccccaatgctgccctttctgctcctttctccacaccccccttggcctcccctccactccttcccaaatctgtctccccagaagacacaggaaacaatgtattgtctgcccagcaatcaaaggcaatgctcaaacacccaagtggcccccaccctcagcccgctcctgcccgcccagcacccccaggccctggggacctggggttctcagactgccaaagaagccttgccatctggcgctcccatggctcttgcaacatctccccttcgtttttgagggggtcatgccgggggagccaccagcccctcactgggttcggaggagagtcaggaagggccacgacaaagcagaaacatcggatttggggaacgcgtgtcatcccttgtgccgcaggctgggcgggagagactgttctgttctgttccttgtgtaactgtgttgctgaaagactacctcgttcttgtcttgatgtgtcaccggggcaactgcctgggggcggggatgggggcagggtggaagcggctccccatttttataccaaaggtgctacatctatgtgatgggtggggtggggagggaatcactggtgctatagaaattgagatgcccccccaggccagcaaatgttcctttttgttcaaagtctatttttattccttgatattttttctttctttttttttttttttgtggatggggacttgtgaatttttctaaaggtgctatttaacatgggaggagagcgtgtgcgctccagcccagcccgctgctcactttccaccctctctccacctgcctctggcttctcaggcctctgctctccgacctctctcctctgaaaccctcctccacagctgcagcccatcctcccggctccctcctagtctgtcctgcgtcctctgtccccgggtttcagagacaacttcccaaagcacaaagcagtttttccctaggggtgggaggaagcaaaagactctgtacctattttgtatgtgtataataatttgagatgtttttaattattttgattgctggaataaagcatgtggaaatgacccaaacataatccgcagtggcctcctaatttccttctttggagttgggggaggggtagacatggggaaggggccttggggtgatgggcttgccttccattcctgccctttccctccccactattctcttctagatccctccataaccccactcccctttctctcacccttcttataccgcaaacctttctacttcctctttcattttctattcttgcaatttccttgcaccttttccaaatcctcttctcccctgcaataccatacaggcaatccacgtgcacaacacacacacacactcttcacatctggggttgtccaaacctcatacccactccccttcaagcccatccactctccaccccctggatgccctgcacttggtggcggtgggatgctcatggatactgggagggtgaggggagtggaacccgtgaggaggacctgggggcctctccttgaactgacatgaagggtcatctggcctctgctcccttctcacccacgctgacctcctgccgaaggagcaacgcaacaggagaggggtctgctgagcctggcgagggtctgggagggaccaggaggaaggcgtgctccctgctcgctgtcctggccctgggggagtgagggagacagacacctgggagagctgtggggaaggcactcgcaccgtgctcttgggaaggaaggagacctggccctgctcaccacggactgggtgcctcgacctcctgaatccccagaacacaacccccctgggctggggtggtctggggaaccatcgtgcccccgcctcccgcctactcctttttaagctt

SEQ ID NO: 34 - DNA, 3496 bp, human
cgaactctgaaaaggcggggcagcgggcctgcagctcctggagttcagggagacccggaaatctcaccctgccctcttcttgtgttgtgtttgtcacagccttgcccctcttgctcgccttgaaaatggaaaagatgctcgcaggctgctttctgctgatcctcggacagatcgtcctcctccctgccgaggccagggagcggtcacgtgggaggtccatctctaggggcagacacgctcggacccacccgcagacggcccttctggagagttcctgtgagaacaagcgggcagacctggttttcatcattgacagctctcgcagtgtcaacacccatgactatgcaaaggtcaaggagttcatcgtggacatcttgcaattcttggacattggtcctgatgtcacccgagtgggcctgctccaatatggcagcactgtcaagaatgagttctccctcaagaccttcaagaggaagtccgaggtggagcgtgctgtcaagaggatgcggcatctgtccacgggcaccatgaccgggctggccatccagtatgccctgaacatcgcattctcagaagcagagggggcccggcccctgagggagaatgtgccacgggtcataatgatcgtgacagatgggagacctcaggactccgtggccgaggtggctgctaaggcacgggacacgggcatcctaatctttgccattggtgtgggccaggtagacttcaacaccttgaagtccattgggagtgagccccatgaggaccatgtcttccttgtggccaatttcagccagattgagacgctgacctccgtgttccagaagaagttgtgcacggcccacatgtgcagcaccctggagcataactgtgcccacttctgcatcaacatccctggctcatacgtctgcaggtgcaaacaaggctacattctcaactcggatcagacgacttgcagaatccaggatctgtgtgccatggaggaccacaactgtgagcagctctgtgtgaatgtgccgggctccttcgtctgccagtgctacagtggctacgccctggctgaggatgggaagaggtgtgtggctgtggactactgtgcctcagaaaaccacggatgtgaacatgagtgtgtaaatgctgatggctcctacctttgccagtgccatgaaggatttgctcttaacccagatgaaaaaacgtgcacaaagatagactactgtgcctcatctaatcacggatgtcagcacgagtgtgttaacacagatgattcctattcctgccactgcctgaaaggctttaccctgaatccagataagaaaacctgcagaaggatcaactactgtgcactgaacaaaccgggctgtgagcatgagtgcgtcaacatggaggagagctactactgccgctgccaccgtggctacactctggaccccaatggcaaaacctgcagccgagtggaccactgtgcacagcaggaccatggctgtgagcagctgtgtctgaacacggaggattccttcgtctgccagtgctcagaaggcttcctcatcaacgaggacctcaagacctgctcccgggtggattactgcctgctgagtgaccatggttgtgaatactcctgtgtcaacatggacagatcctttgcctgtcagtgtcctgagggacacgtgctccgcagcgatgggaagacgtgtgcaaaattggactcttgtgctctgggggaccacggttgtgaacattcgtgtgtaagcagtgaagattcgtttgtgtgccagtgctttgaaggttatatactccgtgaagatggaaaaacctgcagaaggaaagatgtctgccaagctatagaccatggctgtgaacacatttgtgtgaacagtgatgactcatacacgtgcgagtgcttggagggattccggctcgctgaggatgggaaacgctgccgaaggaaggatgtctgcaaatcaacccaccatggctgcgaacacatttgtgttaataatgggaattcctacatctgcaaatgctcagagggatttgttctagctgaggacggaagacggtgcaagaaatgcactgaaggcccaattgacctggtctttgtgatcgatggatccaagagtcttggagaagagaattttgaggtcgtgaagcagtttgtcactggaattatagattccttgacaatttcccccaaagccgctcgagtggggctgctccagtattccacacaggtccacacagagttcactctgagaaacttcaactcagccaaagacatgaaaaaagccgtggcccacatgaaatacatgggaaagggctctatgactgggctggccctgaaacacatgtttgagagaagttttacccaaggagaaggggccaggcctttttccacaagggtgcccagagcagccattgtgttcaccgacggacgggctcaggatgacgtctccgagtgggccagtaaagccaaggccaatggtatcactatgtatgctgttggggtaggaaaagccattgaggaggaactacaagagattgcctctgagcccacaaacaagcatctcttctatgccgaagacttcagcacaatggatgagataagtgaaaaactcaagaaaggcatctgtgaagctctagaagactccgatggaagacaggactctccagcaggggaactgccaaaaacggtccaacagccaacagaatctgagccagtcaccataaatatccaagacctactttcctgttctaattttgcagtgcaacacagatatctgtttgaagaagacaatcttttacggtctacacaaaagctttcccattcaacaaaaccttcaggaagccctttggaagaaaaacacgatcaatgcaaatgtgaaaaccttataatgttccagaaccttgcaaacgaagaagtaagaaaattaacacagcgcttagaagaaatgacacagagaatggaagccctggaaaatcgcctgagatacagatgaagattagaaatcgcgacacatttgtagtcattgtatcacggattacaatgaacgcagtgcagagccccaaagctcaggctattgttaaatcaataatgttgtgaagtaaaacaatcagtactgagaaacctggtttgccacagaacaaagacaagaagtatacactaacttgtataaatttatctaggaaaaaaatccttcagaattctaagatgaatttaccaggtgagaatgaataagctatgcaaggtattttgtaatatactgtggacacaacttgcttctgcctcatcctgccttagtgtgcaatctcatttgactatacgataaagtttgcacagtcttacttctgtagaacactggccataggaaatgctgtttttttgtactggactttaccttgatatatgtatatggatgtatgcataaaatcataggacatatgtacttgtggaacaagttggattttttatacaatattaaaattcaccacttcagag

SEQ ID NO: 35 - DNA, 2388 bp, human
tcctgccccaggcccagcttctctcctgccttccaacgccatggggagcaatctcagcccccaactctgcctgatgccctttatcttgggcctcttgtctggaggtgtgaccaccactccatggtctttggcccagccccagggatcctgctctctggagggggtagagatcaaaggcggctccttccgacttctccaagagggccaggcactggagtacgtgtgtccttctggcttctacccgtaccctgtgcagacacgtacctgcagatctacggggtcctggagcaccctgaagactcaagaccaaaagactgtcaggaaggcagagtgcagagcaatccactgtccaagaccacacgacttcgagaacggggaatactggccccggtctccctactacaatgtgagtgatgagatctctttccactgctatgacggttacactctccggggctctgccaatcgcacctgccaagtgaatggccggtggagtgggcagacagcgatctgtgacaacggagcggggtactgctccaacccgggcatccccattggcacaaggaaggtgggcagccagtaccgccttgaagacagcgtcacctaccactgcagccgggggcttaccctgcgtggctcccagcggcgaacgtgtcaggaaggtggctcttggagcgggacggagccttcctgccaagactccttcatgtacgacacccctcaagaggtggccgaagctttcctgtcttccctgacagagaccatagaaggagtcgatgctgaggatgggcacggcccaggggaacaacagaagcggaagatcgtcctggacccttcaggctccatgaacatctacctggtgctagatggatcagacagcattggggccagcaacttcacaggagccaaaaagtgtctagtcaacttaattgagaaggtggcaagttatggtgtgaagccaagatatggtctagtgacatatgccacataccccaaaatttgggtcaaagtgtctgaagcagacagcagtaatgcagactgggtcacgaagcagctcaatgaaatcaattatgaagaccacaagttgaagtcagggactaacaccaagaaggccctccaggcagtgtacagcatgatgagctggccagatgacgtccctcctgaaggctggaaccgcacccgccatgtcatcatcctcatgactgatggattgcacaacatgggcggggacccaattactgtcattgatgagatccgggacttgctatacattggcaaggatcgcaaaaacccaagggaggattatctggatgtctatgtgtttggggtcgggcctttggtgaaccaagtgaacatcaatgctttggcttccaagaaagacaatgagcaacatgtgttcaaagtcaaggatatggaaaacctggaagatgttttctaccaaatgatcgatgaaagccagtctctgagtctctgtggcatggtttgggaacacaggaagggtaccgattaccacaagcaaccatggcaggccaagatctcagtcattcgcccttcaaagggacacgagagctgtatgggggctgtggtgtctgagtactttgtgctgacagcagcacattgtttcactgtggatgacaaggaacactcaatcaaggtcagcgtaggaggggagaagcgggacctggagatagaagtagtcctatttcaccccaactacaacattaatgggaaaaaagaagcaggaattcctgaattttatgactatgacgttgccctgatcaagctcaagaataagctgaaatatggccagactatcaggcccatttgtctcccctgcaccgagggaacaactcgagctttgaggcttcctccaactaccacttgccagcaacaaaaggaagagctgctccctgcacaggatatcaaagctctgtttgtgtctgaggaggagaaaaagctgactcggaaggaggtctacatcaagaatggggataagaaaggcagctgtgagagagatgctcaatatgccccaggctatgacaaagtcaaggacatctcagaggtggtcacccctcggttcctttgtactggaggagtgagtccctatgctgaccccaatacttgcagaggtgattctggcggccccttgatagttcacaagagaagtcgtttcattcaagttggtgtaatcagctggggagtagtggatgtctgcaaaaaccagaagcggcaaaagcaggtacctgctcacgcccgagactttcacatcaacctctttcaagtgctgccctggctgaaggagaaactccaagatgaggatttgggttttctataaggggtttcctgctggacaggggcgtgggattgaattaaaacagctgcgacaac

SEQ ID NO: 36 - DNA, 4695 bp, human
ggacccgggccggcccccaagatgccggcgatcgcggtattggcggcggccgccgcggcgtggtgcttcctccaagtcgagagccggcacctggacgcgctcgccggaggcgcgggccccaaccacggcaatttcctagacaatgaccagtggctgagcaccgtctcccagtacgaccgggacaagtactggaaccgctttcgagacgatgattatttcagaaactggaatcccaacaagccctttgaccaagccctggacccatccaaggacccctgcctgaaggtaaaatgcagccctcacaaagtgtgtgtgacccaggactaccagaccgccctgtgtgtcagccgcaagcacctgctccccaggcaaaagaaggggaacgtggcccagaaacactgggttggaccttcgaatttggtcaagtgcaagccctgtcccgtggcacagtcagccatggtctgcggctcagatggccactcctacacatccaagtgcaaattggagttccatgcttgttctactggcaaaagcctcgccaccctctgtgatgggccctgtccctgtctcccagagcctgagccaccaaagcacaaggcagaaaggagtgcctgcacagacaaggagttgcggaaccttgcctcccggctgaaggattggtttggagctctccacgaggatgcgaacagagtcatcaagcccaccagctccaacacagcccaaggcaggtttgacactagcatcctgcccatctgcaaggactccctgggctggatgttcaacaagttggacatgaactatgacctcctgcttgacccttcagagatcaatgccatctacctggataagtacgagccctgtatcaagcctcttttcaactcgtgtgactccttcaaggatggcaagctttctaacaatgagtggtgctactgcttccagaagcctggaggtctcccttgccagaatgaaatgaacagaattcagaagctgagtaaggggaaaagcctgttgggggccttcatacctcggtgtaatgaggagggctattacaaagccacacagtgccacggcagcacggggcagtgctggtgtgtggacaaatatgggaatgagttggctggctccaggaaacagggtgctgtgagctgtgaagaggagcaggaaacctcaggggattttggcagtggtgggtccgtggtcctgctggatgacctagaatatgaacgggagctgggaccaaaggacaaagaggggaagctgagggtgcacacccgagccgtgacagaggatgatgaggatgaggatgatgacaaagaggatgaggtcgggtacatatggtagtgcccacaagaaagaggacacaagttttgcacaaaattgcaagtcacttcctattcctgcatttgtatctaagactccaaggcaccaaggtctcttctccattgttgctctctatacccgacctaaggtttggaagacaactgcttgttcccagaggattctgattttgcatatgtttgtatgggagaaagggtgttgtgtttttttttttgttgttgtttattttttggatagggaagtcattggcttaattagagcctccttcctttctgtgagatttttccaacaagcatgtgatttacgtggaattctgacagtgcagggagcccccaccctcttaaatgtcaaagaccctttttgattacccacactggtggttattacagcatggttcccagccttacagtgtctaagtgcttctcttgtgtcctgtagatgttgtgaaaaagaaaaaaacaaaaaatacaccacactgtactttttccccctgcccccgctactgccggtgattattattaaaaattagtttttttcacatcattatatctggcttcctataaacaacagccttaattcagtcaagactccctttgggaattcattttattaaaaattggtgtctggatacttccctgtacatgcataaatatgcatgcatgtacaggaagactgtatgtgtgtgccttgcacacacacccatacctctcagaaaaagtgggtatattaaaaactcgaaaaacaatgataaatttctcagcttgtccagacctggaacaaaatttctggaataagaaatttgtattaaagtccttttttgcactaacagttggctcttgtagcctgcaggctgaggaagtctcttctctgtgcatcagcagagttactgaaagcctctgattgagaaaaaacctccgtctgcctaaatcacttttctcgcagaagccatgcgactcccacacgacacgggcagcttcacaagccatctctttcatttctgcttgaagcccccttggctgcagcaatcctgtctgccataggtttcttccttccttacctactcaagggctttttctaaggcatgcacacatatctcctgttctctgagagtaccatggtgttccttaaaagaagaaaatttctaattctgaactcaatgttttgcttttactccctttctactgacaaatcatgataagggcacaaaagctgtacagatttttttttttaaccactcaatcccaaatggaggcctacaaagaacatcgtaataacacatggaagcaaaccctgggtttttaagagcaaattctgtccccccctcactcccccaagtgacaagatactaatgaagaaagttcttcaccatagtgtttgttttaactaaactcattggagtctagttccaaatttggtagggtcatcatctctacattccttaggatttctctccctatcaagctggcccagatacaagtaccaaacagtagtctctgaagttcccccatttccttcagtaccagtctataagctactgtccgccactgattttcatctatcagggtgtcctaatcagaatcagccacccaagcaagcctctctggcccacatatctatctcttgccttcccccatgaacttcagcctgtccacacaaaagccacataaactcaagcaagaaatatgttcagccaaaacatgattatagtggcagctgaccaatcccccatcccaaattgaccatttagatgtaccaactcaccttaaattagcatgttccaatccagtcggcattgcctgaatacagtagcatcatacctatagttggtcttagataagaaatgaactacttgatatagcaaagtcctttggcttcgtaaataaccctgaggttttgtacttactttccccataggaagacagaccataggcaaactctgttttgggatctcaactccatcacctttgtttcaatattttttttctctcttgaacaaaactgagataatttagaaaacaggtgcttaattgcaataaaattactatgaagtatattaaaaatcacgacattgtaaaatctcactttagatcatcaaagaaaaccattgttactatctcctttgagcttaggaaaatgtacaagagaacaaattaaaattgaaaaattgatttcacttagaaaaacttctaggaacagggtgaaccactgattttaatttgcctaattatcttatgacaagtatcaaattaagatgacacttaaagatccttagcattaacttaatgatggagaagagtgctcaacagacagttcccagtaaggtaatgagatgccattttccgagacattctaagaagatattttgattcattaaaacattaaataaaaagccctcctcagattggaacccccaaatcgatggagtcacattaataatacttttcatgcctcactttgacatgacagcattcgatttttttaaagatctttaatactttccatgagtactaaagattgtaatgagttaccttatccttagaagtagaatgtttgctttcttcttcttggaaatagtcctccaaaaagtccacttgtaccagtgacaagaagtcacttgtatagtgaccaagtacacataaaataccgattataaaaatattgtaataaaccacttcctcatttgatactggtattaagctgaatcctcactaattcacttttgaaaagttcttaatgaacagttttattcttataccatgaacagctcttttaatacaatttccttggtatccaacttaaatcccagaattttgttccaccatggttagttatttgccatatgaatgtattcttgtttctaccaatattctaggcatgagaataccttaatactgagttggagattttgtatctgtttctcctcctttacgcccattttcctacccacagcagcaaatgacaacgtgtctgtccaggtctgtccccctgctcatcccaggatgccactcacatttttttcttctttgttacccttgacccacgctgtacaagtaacatccaagagcccattctacaagtgggtggttttggtctttttataactttttctcaaagtcactgatgtttgttcctgttaaatgtatagcattgtaatgagagcccatcaaatcctgagtgtcagtttgttgtccctattgtagatgaaatagtgatgtagcaaaaacctagtaaattctgaatgcttttccacgtagacttatctggaatgtgaacacaactctttggttaatagtaaatgcttaactgtagtcctgagtaggtgcatttctgtctgtctcaataaattttactttgtcg

SEQ ID NO: 37 - DNA, 1534 bp, human
ggaattccctggagcagagttgagaatggagagaatgttacctctcctggctctggggctcttggcggctgggttctgccctgctgtcctctgccaccctaacagcccacttgacgaggagaatctgacccaggagaaccaagaccgagggacacacgtggacctcggattagcctccgccaacgtggacttcgctttcagcctgtacaagcagttagtcctgaaggcccttgataagaatgtcatcttctccccactgagcatctccaccgccttggccttcctgtctctgggggcccataataccaccctgacagagattctcaaggcctcgagttcacctcacggagacttactgaggcagaaattcactcagagcttccagcacctccgcgcaccctcaatcagttccagcgatgagctgcagctgagtatgggaaatgccatgtttgtcaaagagcaactcagtctgctggacaggttcacggaggatgccaagaggctgtatggctccgaggcctttgccactgactttcaggactcagctgcagctaagaagctcatcaacgactacgtgaagaatggaactagggggaaaatcacagatctgatcaaggaccccgactcgcagacaatgatggtcctggtgaattacatcttctttaaagccaaatgggagatgccctttgacccccaagatactcatcagtcaaggttctacttgagcaagaaaaagtgggtaatggtgcccatgatgagtttgcatcacctgactataccttacttccgggacgaggagctgtcctgcaccgtggtggagctgaagtacacaggcaatgccagcgcactcttcatcctccctgatcaagacaagatggaggaagtggaagccatgctgctcccagagaccctgaagcggtggagagactctctggagttcagagagataggtgagctctacctgccaaagttttccatctcgagggactataacctgaacgacatacttctccagctgggcattgaggaagccttcaccagcaaggctgacctgtcagggatcacaggggccaggaacctagcagtctcccaggtggtccataaggtcgtgtctgatgtatttgaggagggcacagaagcatctgctgccacagcagtcaaaatcaccctcctttctgcattagtggagacaaggaccattgtgcgtttcaacaggcccttcctgatgatcattgtccctacagacacccagaacatcttcttcatgagcaaagtcaccaatcccagcaagcctagagcttgcatcaagcagtggggctctcagtaaggaacttggaatgcaagctggatgcctgggtctctgggcacagctggcccctgtgcaccgtagtggccatggcatgtgtggccctgtctgcttatccttggaaggtgacagcgattccctgtgaagctctcacacgcacaggggcccatggactcttcagtctggagggtcctggcctcctgacagcaataaataatttcgttggcc

SEQ ID NO: 38 - DNA, 5086 bp, human
  misc_feature (27)..(27): n is a, c, g, or t
  misc_feature (46)..(46): n is a, c, g, or t
agcaccacggcagcaggaggtttcggnctaagttggaggtactggnccacgactgcatgcccgcgcccgccaggtgatacctccgccggtgacccaggggctctgcgacacaaggagtctgcatgtctaagtgctagacatgctcagctttgtggatacgcggactttgttgctgcttgcagtaaccttatgcctagcaacatgccaatctttacaagaggaaactgtaagaaagggcccagccggagatagaggaccacgtggagaaaggggtccaccaggccccccaggcagagatggtgaagatggtcccacaggccctcctggtccacctggtcctcctggcccccctggtctcggtgggaactttgctgctcagtatgatggaaaaggagttggacttggccctggaccaatgggcttaatgggacctagaggcccacctggtgcagctggagccccaggccctcaaggtttccaaggacctgctggtgagcctggtgaacctggtcaaactggtcctgcaggtgctcgtggtccagctggccctcctggcaaggctggtgaagatggtcaccctggaaaacccggacgacctggtgagagaggagttgttggaccacagggtgctcgtggtttccctggaactcctggacttcctggcttcaaaggcattaggggacacaatggtctggatggattgaagggacagcccggtgctcctggtgtgaagggtgaacctggtgcccctggtgaaaatggaactccaggtcaaacaggagcccgtgggcttcctggtgagagaggacgtgttggtgcccctggcccagctggtgcccgtggcagtgatggaagtgtgggtcccgtgggtcctgctggtcccattgggtctgctggccctccaggcttcccaggtgcccctggccccaagggtgaaattggagctgttggtaacgctggtcctgctggtcccgccggtccccgtggtgaagtgggtcttccaggcctctccggccccgttggacctcctggtaatcctggagcaaacggccttactggtgccaagggtgctgctggccttcccggcgttgctggggctcccggcctccctggaccccgcggtattcctggccctgttggtgctgccggtgctactggtgccagaggacttgttggtgagcctggtccagctggctccaaaggagagagcggtaacaagggtgagcccggctctgctgggccccaaggtcctcctggtcccagtggtgaagaaggaaagagaggccctaatggggaagctggatctgccggccctccaggacctcctgggctgagaggtagtcctggttctcgtggtcttcctggagctgatggcagagctggcgtcatgggccctcctggtagtcgtggtgcaagtggccctgctggagtccgaggacctaatggagatgctggtcgccctggggagcctggtctcatgggacccagaggtcttcctggttcccctggaaatatcggccccgctggaaaagaaggtcctgtcggcctccctggcatcgacggcaggcctggcccaattggcccagctggagcaagaggagagcctggcaacattggattccctggacccaaaggccccactggtgatcctggcaaaaacggtgataaaggtcatgctggtcttgctggtgctcggggtgctccaggtcctgatggaaacaatggtgctcagggacctcctggaccacagggtgttcaaggtggaaaaggtgaacagggtcccgctggtcctccaggcttccagggtctgcctggcccctcaggtcccgctggtgaagttggcaaaccaggagaaaggggtctccatggtgagtttggtctccctggtcctgctggtccaagaggggaacgcggtcccccaggtgagagtggtgctgccggtcctactggtcctattggaagccgaggtccttctggacccccagggcctgatggaaacaagggtgaacctggtgtggttggtgctgtgggcactgctggtccatctggtcctagtggactcccaggagagaggggtgctgctggcatacctggaggcaagggagaaaagggtgaacctggtctcagaggtgaaattggtaaccctggcagagatggtgctcgtggtgctcatggtgctgtaggtgcccctggtcctgctggagccacaggtgaccggggcgaagctggggctgctggtcctgctggtcctgctggtcctcggggaagccctggtgaacgtggcgaggtcggtcctgctggccccaacggatttgctggtccggctggtgctgctggtcaaccgggtgctaaaggagaaagaggagccaaagggcctaagggtgaaaacggtgttgttggtcccacaggccccgttggagctgctggcccagctggtccaaatggtccccccggtcctgctggaagtcgtggtgatggaggcccccctggtatgactggtttccctggtgctgctggacggactggtcccccaggaccctctggtatttctggccctcctggtccccctggtcctgctgggaaagaagggcttcgtggtcctcgtggtgaccaaggtccagttggccgaactggagaagtaggtgcagttggtccccctggcttcgctggtgagaagggtccctctggagaggctggtactgctggacctcctggcactccaggtcctcagggtcttcttggtgctcctggtattctgggtctccctggctcgagaggtgaacgtggtctacctggtgttgctggtgctgtgggtgaacctggtcctcttggcattgccggccctcctggggcccgtggtcctcctggtgctgtgggtagtcctggagtcaacggtgctcctggtgaagctggtcgtgatggcaaccctgggaacgatggtcccccaggtcgcgatggtcaacccggacacaagggagagcgcggttaccctggcaatattggtcccgttggtgctgcaggtgcacctggtcctcatggccccgtgggtcctgctggcaaacatggaaaccgtggtgaaactggtccttctggtcctgttggtcctgctggtgctgttggcccaagaggtcctagtggcccacaaggcattcgtggcgataagggagagcccggtgaaaaggggcccagaggtcttcctggcttaaagggacacaatggattgcaaggtctgcctggtatcgctggtcaccatggtgatcaaggtgctcctggctccgtgggtcctgctggtcctaggggccctgctggtccttctggccctgctggaaaagatggtcgcactggacatcctggtacggttggacctgctggcattcgaggccctcagggtcaccaaggccctgctggcccccctggtccccctggccctcctggacctccaggtgtaagcggtggtggttatgactttggttacgatggagacttctacagggctgaccagcctcgctcagcaccttctctcagacccaaggactatgaagttgatgctactctgaagtctctcaacaaccagattgagacccttcttactcctgaaggctctagaaagaacccagctcgcacatgccgtgacttgagactcagccacccagagtggagcagtggttactactggattgaccctaaccaaggatgcactatggatgctatcaaagtatactgtgatttctctactggcgaaacctgtatccgggcccaacctgaaaacatcccagccaagaactggtataggagctccaaggacaagaaacacgtctggctaggagaaactatcaatgctggcagccagtttgaatataatgtagaaggagtgacttccaaggaaatggctacccaacttgccttcatgcgcctgctggccaactatgcctctcagaacatcacctaccactgcaagaacagcattgcatacatggatgaggagactggcaacctgaaaaaggctgtcattctacagggctctaatgatgttgaacttgttgctgagggcaacagcaggttcacttacactgttcttgtagatggctgctctaaaaagacaaatgaatggggaaagacaatcattgaatacaaaacaaataagccatcacgcctgcccttccttgatattgcacctttggacatcggtggtgctgaccatgaattctttgtggacattggcccagtctgtttcaaataaatgaactcaatctaaattaaaaaagaaagaaatttgaaaaaactttctctttgccatttcttcttcttcttttttaactgaaagctgaatccttccatttcttctgcacatctacttgcttaaattgtgggcaaaagagaaaaagaaggattgatcagagcattgtgcaatacagtttcattaactccttcccccgctcccccaaaaatttgaatttttttttcaacactcttacacctgttatggaaaatgtcaacctttgtaagaaaaccaaaataaaaattgaaaaataaaaaccataaacatttgcaccacttgtggcttttgaatatcttccacagagggaagtttaaaacccaaacttccaaaggtttaaactacctcaaaacactttcccatgagtgtgatccacattgttaggtgctgacctagacagagatgaactgaggtccttgttttgttttgttcataatacaaaggtgctaattaatagtatttcagatacttgaagaatgttgatggtgctagaagaatttgagaagaaatactcctgtattgagttgtatcgtgtggtgtattttttaaaaaatttgatttagcattcatattttccatcttattcccaattaaaagtatgcagattatttgcccaaagttgtcctcttcttcagattcagcatttgttctttgccagtctcattttcatcttcttccatggttccacagaagctttgtttcttgggcaagcagaaaaattaaattgtacctattttgtatatgtgagatgtttaaataaattgtgaaaaaaatgaaataaagcatgtttggttttccaaaagaacatat

SEQ ID NO: 39 - DNA, 4277 bp, human
gaagatgagagactgcttaggcgccaccactagtaccatgagtccctgcactggttaaagccatcgccacaacctggacaggcagcaagggctctgggtttgcagagagccgaaatgaccatgactgccaacaagaattccagcatcacccacggagctggtggcactaaagcccctcgggggactctgagcaggtctcagtcagtctctccacctccagtcctctccccaccaaggagtcccatctacccgctcagtgatagtgaaacctcagcctgcaggtaccccagccactccagctcccgggtgctcctcaaggaccggcaccccccagctccttcaccccagaatcctcaagatccctccccagatacttccccacccacctgtcccttcaagaccgccagcttcggttatttggacagaagcccttcggcgtgcaagagagacacccaaaaggaaagtgtccaaggcgcagcccaggatgtagcaggggtcgctgcctgcctcccccttgcccagagcacgccattcccggggccagcagctggcccccggggcgtcttgctgacccgtaccggtacccgcagcccacagcctgggcatccgggagaagatatagcatgggaaggtcgccgagaggcgtcgcccaggatgagcatgtgtggagagaagcgggagggctctgggagcgagtgggcggccagtgagggctgccccagcctgggctgtcccagcgtggtgccgtccccctgcagctctgaaaagacctttgatttcaagggcctccggaggatgagcaggaccttctccgagtgttcctacccagagactgaggaggagggagaggcgctccctgtccgggactctttctaccggctggagaaacggctgggccggagtgagcccagcgccttcctcagggggcatggcagcaggaaggagagctcagcagtgctgagccggatccagaaaattgaacaggtcctgaaggagcagccgggccgggggctcccccagctccccagcagctgctacagcgtcgaccgggggaaaaggaagactggaaccttgggctccttggaggagccggcagggggcgcgagtgtgagcgctggcagccgggcagtcggagtggctggtgttgcgggggaggcgggcccacccccagagagggaaggcagtggttccactaagcccgggacccctggaaatagccctagctcccagcggctgccatcgaagagttccctcgatcccgctgtgaaccctgtccccaaacccaagcgcacctttgaatacgaggctgagaagaaccccaagagtaagcccagtaatggtctacctccttcacccacacctgctgctccacctcccttgccctccaccccagccccgccagtcacccggagacccaagaaggacatgcgtggtcaccgcaagtcccagagcagaaaatcctttgagtttgaggatgcatccagtctccagtccctgtacccctcttctcccactgagaatggtactgagaaccaacccaagtttggatccaaaagcactttagaagaaaatgcctatgaagatattgtgggagatctgcccaaggagaatccatatgaggatgtggacttaaagagccgaagagcaggacgaaaatcccagcaactgtctgagaactccttggactctttgcacaggatgtggagtcctcaggacaggaagtacaacagcccgcccacacagctttccctgaaacccaacagccagtccctgcgcagtgggaactggtcagaaaggaagagccaccggctgccacgattacccaagaggcacagccatgacgacatgctgctgctggctcagctgagtctgccgtcctcaccctccagcctcaatgaagacagcctcagcaccaccagcgagctgctgtccagccgccgggcccgccgcattcccaagcttgtccaaagaattaactccatctacaatgccaagagaggaaagaagagattaaaaaagttgtctatgtccagcattgaaacagcatcactgagagatgaaaacagtgagagcgagagcgactctgatgacaggttcaaagcccacacacagcgcctggtccacatccagtcgatgctgaagcgcgcccccagctatcgcacgctggagctggagctgctggagtggcaggagcgggagctttttgagtactttgtggtggtgtccctcaagaagaagccatcgcgaaacacctacctccccgaagtctcctaccagtttcccaagctggaccgacccaccaagcagatgcgagaggcagaggaaaggctcaaagccattccccagttttgcttccctgatgccaaggactggcttcctgtgtcagagtatagcagtgagaccttttctttcatgctgactggggaagatggcagcagacgctttggctactgcaggcgcttactgccaagtgggaaagggccccggttgccagaggtgtactgtgtcatcagccgccttggctgcttcggcttgttttccaaggtcctagatgaggtggagcgccggcgtgggatctccgctgcattggtctatcctttcatgagaagtctcatggagtcgcccttcccagccccagggaagaccatcaaagtgaagacattcctgccaggtgctggcaatgaggtgttagagctgcggcggcccatggactcaaggctggagcacgtggactttgagtgcctttttacctgcctcagtgtgcgccagctcatccgaatctttgcctcactgctgctggagcgccgggtcatttttgtggcagataagctcagtaccctctccagctgctcccacgcggtggtggccttgctctaccccttctcctggcagcacaccttcattcctgtcctcccggcctccatgattgacatcgtctgctgtcccacccccttcctggttggcctgctctccagctccctccccaaactgaaggagctgcctgtggaggaggcgctgatggtgaatctgggatctgaccgattcatccgacagatggacgacgaagacacgttgttacctaggaagttacaggcagctctggagcaggctctggagaggaagaatgagctgatctcccaggactctgacagcgactccgacgatgaatgtaataccctcaatgggctggtgtcggaggtgtttatccggttctttgtggagaccgttgggcactactccctctttctgacacagagtgagaagggagagagggcctttcagcgagaggccttccgcaaatctgtggcctccaaaagcatccgccgctttcttgaggtttttatggagtctcagatgtttgctggcttcatccaagacagggagctaagaaagtgtcgggcaaagggcctttttgagcagcgagtggagcagtacttagaagaactcccagacactgagcagagtggaatgaataagtttctccgaggtttgggcaacaaaatgaagtttctccacaagaagaattaagcctccttctcagtagcagagtccagtgccttgcagagcctgaagcctggggagaaggcccagcctgggaccctctgggctgctgtggctcctctgcccccacagatcctatcctccaagccagcccacctctgccttcatcatatcccaggatactgtttgtaaataatctgctgtaagctttcttaactgttttttgtaacaagcaaagagaatatggcaaatatttgtatattcccaaggggccgggtgctttcctgtcctgccagagcatggatgaagtttcgctgggtgctcgtgactggccagttttgtgcagctgactgtctcagccaaaccactgatcttccctggaggccttcggcctgcctgcctgcctgcctgaggtccccgctgccagtcccgggccctggagagcagatgctgtcttgttatgtacaggaggaccttttaaaaaaatcaagtttctattttttgctggtagtccgcatacccataccctctgtttttgaaaggcaaaggccaatcagtccccatttgtagcatggcaccagggtcttaggcctagtcctctcattcctcccaccctccgagatggtcagtgtgtcatgggaagcccacccccagctctgccagtgctctctgggcctggctcccagtcagtggtggccacgatgcggtacagggcatccctccttcccatctacgggtgttgtcaataaacaatgtacagttgtttgggcccagag

SEQ ID NO: 40 - DNA, 3018 bp, human
ctcctcacaggtgtgtctctagtcctcgtggttgcctgccccactccctgccgagacgcctgccagaaaggtcacctatcctgaaccccagcaagcctgaaacagctcagccaagcaccctgcgatggaagctgcagatgcctccaggagcaacgggtcgagcccagaagccagggatgcccggagcccgtcgggccccagtggcagcctggagaatggcaccaaggctgacggcaaggatgccaagaccaccaacgggcacggcggggaggcagctgagggcaagagcctgggcagcgccctgaagccaggggaaggtaggagcgccctgttcgcgggcaatgagtggcggcgacccatcatccagtttgtcgagtccggggacgacaagaactccaactacttcagcatggactctatggaaggcaagaggtcgccgtacgcagggctccagctgggggctgccaagaagccacccgttacctttgccgaaaagggcgacgtgcgcaagtccattttctcggagtcccggaagcccacggtgtccatcatggagcccggggagacccggcggaacagctacccccgggccgacacgggccttttttcacggtccaagtccggctccgaggaggtgctgtgcgactcctgcatcggcaacaagcagaaggcggtcaagtcctgcctggtgtgccaggcctccttctgcgagctgcatctcaagccccacctggagggcgccgccttccgagaccaccagctgctcgagcccatccgggactttgaggcccgcaagtgtcccgtgcatggcaagacgatggagctcttctgccagaccgaccagacctgcatctgctacctttgcatgttccaggagcacaagaatcatagcaccgtgacagtggaggaggccaaggccgagaaggagacggagctgtcactgcaaaaggagcagctgcagctcaagatcattgagattgaggatgaagctgagaagtggcagaaggagaaggaccgcatcaagagcttcaccaccaatgagaaggccatcctggagcagaacttccgggacctggtgcgggacctggagaagcaaaaggaggaagtgagggctgcgctggagcagcgggagcaggatgctgtggaccaagtgaaggtgatcatggatgctctggatgagagagccaaggtgctgcatgaggacaagcagacccgggagcagctgcatagcatcagcgactctgtgttgtttctgcaggaatttggtgcattgatgagcaattactctctccccccacccctgcccacctatcatgtcctgctggagggggagggcctgggacagtcactaggcaacttcaaggacgacctgctcaatgtatgcatgcgccacgttgagaagatgtgcaaggcggacctgagccgtaacttcattgagaggaaccacatggagaacggtggtgaccatcgctatgtgaacaactacacgaacagcttcgggggtgagtggagtgcaccggacaccatgaagagatactccatgtacctgacacccaaaggtggggtccggacatcataccagccctcgtctcctggccgcttcaccaaggagaccacccagaagaatttcaacaatctctatggcaccaaaggtaactacacctcccgggtctgggagtactcctccagcattcagaactctgacaatgacctgcccgtcgtccaaggcagctcctccttctccctgaaaggctatccctccctcatgcggagccaaagccccaaggcccagccccagacttggaaatctggcaagcagactatgctgtctcactaccggccattctacgtcaacaaaggcaacgggattgggtccaacgaagccccatgagctcctggcggaaggaacgaggcgccacacccctgctcttcctcctgaccctgctgctcttgccttctaagctactgtgcttgtctgggtgggagggagcctggtcctgcacctgccctctgcagccctctgccagcctcttgggggcagttccggcctctccgacttccccactggccacactccattcagactcctttcctgccttgtgacctcagatggtcaccatcattcctgtgctcagaggccaacccatcacaggggtgagataggttggggcctgccctaacccgccagcctcctcctctcgggctggatctgggggctagcagtgagtacccgcatggtatcagcctgcctctcccgcccacgccctgctgtctccaggcctatagacgtttctctccaaggccctatcccccaatgttgtcagcagatgcctggacagcacagccacccatctcccattcacatggcccacctcctgcttcccagaggactggccctacgtgctctctctcgtcctacctatcaatgcccagcatggcagaacctgcagtggccaagggctgcagatggaaacctctcagtgtcttgacatcaccctacccaggcggtgggtctccaccacagccactttgagtctgtggtccctggagggtggcttctcctgactggcaggatgaccttagccaagatattcctctgttccctctgctgagataaagaattcccttaacatgatataatccacccatgcaaatagctactggcccagctaccatttaccatttgcctacagaatttcattcagtctacactttggcattctctctggcgatggagtgtggctgggctgaccgcaaaaggtgccttacacactgcccccaccctcagccgttgccccatcagaggctgcctcctccttctgattaccccccatgttgcatatcagggtgctcaaggattggagaggagacaaaaccaggagcagcacagtggggacatctcccgtctcaacagccccaggcctatgggggctctggaaggatgggccagcttgcaggggttggggagggagacatccagcttgggctttcccctttggaataaaccattggtctgtc

SEQ ID NO: 41 - DNA, 969 bp, human
agctttggggttgtccctggacttgtcttggttccagaacctgacgacccggcgacggcgacgtctcttttgactaaaagacagtgtccagtgctccagcctaggagtctacggggaccgcctcccgcgccgccaccatgcccaacttctctggcaactggaaaatcatccgatcggaaaacttcgaggaattgctcaaagtgctgggggtgaatgtgatgctgaggaagattgctgtggctgcagcgtccaagccagcagtggagatcaaacaggagggagacactttctacatcaaaacctccaccaccgtgcgcaccacagagattaacttcaaggttggggaggagtttgaggagcagactgtggatgggaggccctgtaagagcctggtgaaatgggagagtgagaataaaatggtctgtgagcagaagctcctgaagggagagggccccaagacctcgtggaccagagaactgaccaacgatggggaactgatcctgaccatgacggcggatgacgttgtgtgcaccagggtctacgtccgagagtgagtggccacaggtagaaccgcggccgaagcccaccactggccatgctcaccgccctgcttcactgccccctccgtcccaccccctccttctaggatagcgctccccttaccccagtcacttctgggggtcactgggatgcctcttgcagggtcttgctttctttgacctcttctctcctcccctacaccaacaaagaggaatggctgcaagagcccagatcacccattccgggttcactccccgcctccccaagtcagcagtcctagccccaaaccagcccagagcagggtctctctaaaggggacttgagggcctgagcaggaaagactggccctctagcttctaccctttgtccctgtagcctatacagtttagaatatttatttgttaattttattaaaatgctttaaaaaaa

SEQ ID NO: 42 - DNA, 2271 bp, human
gcacgcactggccccggcgcccacccgcacccctccccagagagcactgacacggctcccgggacctcggcaggatggaagagaagctgaagaaaaccaagatcatctttgtggtgggtgggcctggctcagggaagggcacccagtgtgagaagatcgtgcagaagtatggctacacccacctctccaccggggacctcctgcggtccgaggtcagctcaggctcggccaggggcaagaagctgtcggaaatcatggagaaggggcagctggttccactggagacagtgttggacatgctccgggatgccatggtggccaaagtcaatacttccaaaggcttcctgattgatggctacccgcgggaggtgcagcaaggagaagagtttgagcgacggattggacagcccacactgctgctgtatgtggacgcaggccctgagaccatgacccagcggctcttgaaacgtggagagaccagcgggcgtgtggacgacaatgaggagaccatcaaaaagcggctggagacctattacaaggccacagaacccgtcatcgccttctatgagaaacgtggcattgtgcgcaaggtcaacgctgagggctccgtggacagtgtcttctcccaggtctgcacccacctggacgccctaaagtagcaacgctggagccgcttccccagctcagagccccgccccaccccgtcctgattagaggtcctcctggcctgagcgcagcgcctccaccctgccctgctgagcacagacggaggaagccgcttatcctgttttcatggacagctgagcactaaaggaatttctaaggacatttggttttactgctttttctctgcttccagttggagttgattcatgtgcttgtgcctacctggccgcaagtccccagcccctcaaccctccgttcctcctcagcctccctttgccagccacccctcctctagctctggtgggaggcccggggcccttcctcgcacagggcatgcctggcctgaggacccggcgctgagtggcggggcccctgctccgaggggctcatgttcaggcagaaccggtcccagcctgggctcctctgcatcttgctctgtgccttggccctgacccccatcgctctgagcatatgttccatgcctgccttgccggggcctggactgcacaggcagcaaggtcatggtctgagtggggcttcctgggcagttggggcggcccacgccagctggcccagtgggtagtgaattggcttccttgacgcgagaggctctgagggtctgaaaagggcatctcaatggcatgggtgggtggggagtcagtcatgtcactgaaattgaatgggggaggcccaatgaggtggctcatgcctgtaatcccagcactttgggaagctgaggcaggaggatcacctgaggtcaggagttcgagagcagcctggccaacatggcaaaaccccttatttactaaaaatacaaaaacttagccgggcatggtggcatgtgcctgtattcccagctactcatgaggctgaggcaggagaatggcgtgaacccgggagtggagcttgcaatgagccaagattgcgccactgcactccagcctgggtgacagagcaagactccgtctcaaaaaaaaaaaaaaaaaaaaagaaattaattgggggagtcatggtcaggggtgagacctgaaggacctccccctgtgtggccctggacacagcccaccctctgtgagccgtttccaattctaaaacagactcaatgtccccctcacccccacctcaaggtcaggatgcgaacacactgagtgaggagtggacgctgtccattgccacggccatgagggctggagaccagaacagcatggcccgaagcgtgcggggccccggatgacttggggacaccccagaatcccctggggagaacccttcctgcgcgctttcattttttgacctcatcactgagaaaggctcaatttggtgctcacgtgtccttaacacctgatctggcccaagctgcgtgccctttaagccaagagagcctcttgtggaccccgcctgcccgaatgaaatccgaacagttggggctgttatggcaagtggggctggtttttcatttccattggttatttaaagtttcctttaaaataaacgattttaagttataaaaggtgaatctattgaaagaagaacatcaaagaaataaacaggagttcagcggagtagcagaagacaaggcatgtagggggagccattctgtcccag

SEQ ID NO: 43 - DNA, 1528 bp, human
ccggctcccattccggctccagcctccaatccgacccccatttcggctgcagcctcggacctagctccggccctcggtctatccggttgcatcctccctccctgttccggatcttatcttgcgccagcgcctactccaggatcccgtagccagacctcaagccatggctggtcccttctcccgtctgctgtccgcccgcccgggactcaggctcctggctttggccggagcggggtctctagccgctgggtttctgctccgaccggaacctgtacgagctgccagtgaacgacggaggctgtatcccccgagcgctgagtacccagacctccgaaagcacaacaactgcatggccagtcacctgaccccagcagtctatgcacggctctgcgacaagaccacacccactggttggacgctagatcagtgtatccagactggcgtggacaaccctggccaccccttcatcaagactgtgggcatggtggctggagatgaggagacctatgaggtatttgctgacctgtttgaccctgtgatccaagagcgacacaatggatatgacccccggacaatgaagcacaccacggatctagatgccagtaaaatccgttctggctactttgatgagaggtatgtattgtcctctagagtcagaactggccgaagcatccgaggactcagtctgcctccagcttgcactcgagcagagcgacgagaggtggaacgtgttgtggtggatgcactgagtggcctgaagggtgacctggctggacgttactataggctcagtgagatgacagaggctgaacagcagcagcttattgatgaccactttctgtttgataagcctgtgtccccgttgctgactgcagcaggaatggctcgagactggccagatgctcgtggaatttggcacaacaatgagaagagcttcctgatctgggtgaatgaggaggatcatacacgggtgatctccatggagaagggtggtaacatgaagagagtgtttgaaagattctgccgaggcctcaaagaggtggagagacttatccaagaacgtggctgggagttcatgtggaatgagcgtttgggatacatcttgacctgtccatctaacctgggcactggacttcgggcaggagtgcacatcaaactgcccctgctaagcaaagatagccgcttcccaaagatcctggagaacctaagactccaaaaacgtggtactggaggagtggacactgctgctacaggcggtgtctttgatatttctaatttggaccgactaggcaaatcagaggtggagctggtgcaactggtcatcgatggagtaaactatttgattgattgtgaacggcgtctggagagaggccaggatatccgcatccccacacctgtcatccacaccaagcattaactccccatcgccagctgatgactcaagattcccaggagttttgctcattctaatgatggcccattctacttgctctggacctgcccccgcatcccctgcctccatcctagt

SEQ ID NO: 44 - DNA, 5332 bp, human
gagaaaagtcacatccagctccttcatgttgctgccgatgtgggattttcctggcttcgtcagccaagcaattggctgcctttgccggaggctttgagaaccaaggcttgaaggccggcaggagcatccagggggaagcttggcttcagggaggacctagcagacgttgggccggagcactagcctcacggagaaggatctgaaagaagccaaggcgcggagccagcagattgcagcccagctgaccacccctcccagctccaattcccgtggcgtccagctcttcaacaggcgccggcagagggtgaacgagttcaccttggagagccacggccagaggggacagaagcccagccaggagtccctcagagtgctcccttcaagcctcccaggccatgcaccggggctcagcctgagttccacctcgctgccggagccaggccctccacggcaccccagtccccagagccccgacagaggggtccctggccacagcatggaggggtactcagaggaggctagcttgctgcggcacctggagaaggtggccagtgaggaggaagaggtaccactggtggtttatctaaaggagaatgcagcactgctgacagccaatgggctgcacctgtcccaaaaccgagaggcccagcagtcctcaccggccccacctccagctgaggtccacagcccagctgcagatgtcaaccaaaaccttgcctcgcccagtgccacgctcaccacaccaacttctaacagcagccacaatccgccagccaccgatgtcaatcagaacccaccggcaactgttgtcccacagagcctgccactttctagcatccaacagaattcctcagaggcccaactcccatctaatggcacagggcctgcttccaaacccagcaccctgtgtgctgatgggcaaccccaggcaccggctgaggaggtgagatgcagcacactcctaattgacaaggtatcaactccagctaccaccaccagcaccttctccagagaagctacgctcatccccagctccaggcccccagcctcagatttcatgtccagctccctgctcattgacatccagcccaacaccctagtggtgtcagcagatcaagagatgtctgggcgagcagctgccaccacgcccaccaaggtctacagtgaggtccacttcacactggccaagcccccatcagtggtcaacaggacggccaggccttttgggatccaggcgccagggggcaccagccagatggagaggagccccatgctagagagacgacattttggggagaaggccccggctccccagccccccagtttgccagacaggagcccccggccacagagacacataatgtcccgcagccccatggtggaaaggaggatgatggggcagcgaagcccggcctcagagagacgccccttggggaacttcactgcaccccccacctacactgagaccttgtccacagcccctctggcttcctgggtgaggtctcctccctcatattctgtcctgtatcccagctccgaccccaagtcttctcatctgaagggccaggcggttcctgccagcaagacgggcattctggaggagtcgatggcccgccggggcagccgcaaatccatgtttactttcgtggagaagcccaaggtgaccccgaatccagacttgctggatctggtacagacagcggatgagaagcggcggcagagggaccagggggaggtaggcgtggaggaggagcccttcgcactgggggccgaggcctccaacttccagcaggagccagcacctcgtgacagggccagccccgcggcggcggaggaggtggtaccagagtgggcctcctgcctcaagtcaccccgcatccaggccaagccgaagcccaaacccaaccagaacctctccgaggcctctgggaagggagctgagctctacgcccgccgccagtcacggatggagaaatatgtcatcgagtcttcaagccacacgccagagctggcccgctgcccatcacctaccatgtccctgccttcctcctggaaataccccactaacgcccccggggccttccgagtggcatcccgaagcccagcccggaccccgcctgcctccctctaccatggctacctgcctgagaacggggtcctgcgcccagagcccaccaagcagccgccataccagctgcgcccctcgctctttgtcctctcacctatcaaggagcctgccaaggtctcaccaagagctgcctcgcccgccaagcccagctccttggacctggtgcccaacctgcccaagggggctctccctccatctcctgccctgcctcggccctcgcgctcctcaccgggcctctacacctcccccggccaggacagcctgcagcccactgccgtgagccctccttacggcggtgacatctcccccgtgtctccctccagggcgtggtctccccgagccaagcaggcccccaggccctccttctctacccggaacgccgggatcgaggctcaggaccgccgggagagcctgcccacctccccaccctggacgccgggcgcgtcccggccccccagcagcctagacggctgggtgagcccgggcccgtgggagccaggtcgcgggagcagcatgagcagccccccgccgctgccgccgccaccgcccatgtctccctcgtggagcgagcgctcggtgtccccgctgcgacctgagaccgaggcgcggccccccagccgccagctgcaggcgcttctggcgcgaaacatcatcaatgcggcccggcgcaagagcgcctccccgcggtcggcgggcgccgagaacccgcggcccttctccccgccgagggcgccaccgcccccgcccccgcccccgcccccgcccccgcgcatgcgctcgccacagcccgcccgccccggctcggctgctgtgccgggggcagccttcgcgcccatcccgcggagcccgttgcccgccggtccttcgtcctgcaccagtccccggagcccgctgcccgcgcctcccaggcccttcctctaccgccgctcgcccacggactccgacgtgtccctcgactccgaggactccggggctaagtctccaggcatcctgggctacaatatctgtccccgcgggtggaatggcagccttcggctcaagcgtggcagcctccccgccgaggcctcctgcaccacctagagccccacccccgaccccaccccgggagggcagagccagaagaaggctcattagacctgggggacccaaagggtctggcctctttgggcagccccagagatgaggggtcagcagaggagagctctggggttggggatgggttagggacgcaagcttgagttctagcccttgctctcattcagctgttgtgtgaccctgggtaagacccttccttgtttgaccctcagctttcccatctgtttaatggtggctttggccaaggcaatccacaaacgtcaaaattccccttcccatcagtacacacaccgatgcacacacactctctctttctctctctctctctctcacacacacacacacacacacacacacacacacacacacacacacacactagttagtgccttggatgaggcggggcagtgtgtatatggacccctggacttgctaccttcagggttccatactcgtccctcccctcctggctctgctgtctggagtctggcaagcggggtgtgttcagaaggtcctaggcctgtgtcgcatgtccaggcactggcctgaccatccggctccctggcaccaagtcccaggcaggagcagctgttttccatcccttcccagacaagctctatttttatcacaatgacctttagagaggtctcccaggccagctcaaggtgtcccactatcccctctggagggaagaggcaggaaaattctccccgggtccctgtcatgctactttctccatcccagttcagactgtccaggacatcttatctgcagccataagagaattataaggcagtgatttcccttaggcccaggacttgggcctccagctcatctgttccttctgggcccattcatggcaggttctgggctcaaagctgaactggggagagaagagatacagagctaccatgtgactttacctgattgccctcagtttggggttgcttattgggaaagagagagacaaagagttacttgttacgggaaatatgaaaagcatggccaggatgcatagaggagattctagcaggggacaggattggctcagatgacccctgagggctcttccagtcttgaaatgcattccatgatattaggaagtcgggggtgggtggtggtggtgggctagttgggcttgaatttaggggccgatgagcttgggtacgtgagcagggtgttaagttagggtctgcctgtatttctggtccccttggaaatgtccccttcttcagtgtcagacctcagtcccagtgtccatatcgtgcccagaaaagtagacattatcctgccccatcccttccccagtgcactctgacctagctagtgcctggtgcccagtgacctgggggagcctggctgcaggccctcactggttccctaaaccttggtggctgtgattcaggtccccaggggggactcagggaggaatatggctgagttctgtagtttccagagttggctggtagagccttctagaggttcagaatattagcttcaggatcagctgggggtatggaattggctgaggatcaaacgtatgtaggtgaaaggataccaggatgttgctaaaggtgagggacagtttgggtttgggacttaccggggtgatgttagatctggaacccccaagtgaggctggagggagttaaggtcagtatggaagatagggttgggacagggtgctttggaatgaaagagtgaccttagagggctccttgggcctcaggaatgctcctgctgctgtgaagatgagaaggtgctcttactcagttaatgatgagtgactatatttaccaaagcccctacctgctgctgggtcccttgtagcacaggagactggggctaagggcccctcccagggaagggacaccatcaggcctctggctgaggcagtagcatagaggatccatttctacctgcatttcccagaggactagcaggaggcagccttgagaaaccggcagttcccaagccagcgcctggctgttctctcattgtcactgccctctccccaacctctcctctaacccactagagattgcctgtgtcctgcctcttgcctcttgtagaatgcagctctggccctcaataaatgcttcctgcatt

SEQ ID NO: 45 - DNA, 2399 bp, human
cggccgagcccagctctccgagcaccgggtcggaagccgcgacccgagccgcgcaggaagctgggaccggaacctcggcggacccggccccacccaactcacctgcgcaggtcaccagcaccctcggaacccagaggcccgcgctctgaaggtgacccccctggggaggaaggcgatggcccctgcgaggacgatggcccgcgcccgcctcgccccggccggcatccctgccgtcgccttgtggcttctgtgcacgctcggcctccagggcacccaggccgggccaccgcccgcgccccctgggctgcccgcgggagccgactgcctgaacagctttaccgccggggtgcctggcttcgtgctggacaccaacgcctcggtcagcaacggagctaccttcctggagtcccccaccgtgcgccggggctgggactgcgtgcgcgcctgctgcaccacccagaactgcaacttggcgctagtggagctgcagcccgaccgcggggaggacgccatcgccgcctgcttcctcatcaactgcctctacgagcagaacttcgtgtgcaagttcgcgcccagggagggcttcatcaactacctcacgagggaagtgtaccgctcctaccgccagctgcggacccagggctttggagggtctgggatccccaaggcctgggcaggcatagacttgaaggtacaaccccaggaacccctggtgctgaaggatgtggaaaacacagattggcgcctactgcggggtgacacggatgtcagggtagagaggaaagacccaaaccaggtggaactgtggggactcaaggaaggcacctacctgttccagctgacagtgactagctcagaccacccagaggacacggccaacgtcacagtcactgtgctgtccaccaagcagacagaagactactgcctcgcatccaacaaggtgggtcgctgccggggctctttcccacgctggtactatgaccccacggagcagatctgcaagagtttcgtttatggaggctgcttgggcaacaagaacaactaccttcgggaagaagagtgcattctagcctgtcggggtgtgcaaggcccctccatggaaaggcgccatccagtgtgctctggcacctgtcagcccacccagttccgctgcagcaatggctgctgcatcgacagtttcctggagtgtgacgacacccccaactgccccgacgcctccgacgaggctgcctgtgaaaaatacacgagtggctttgacgagctccagcgcatccatttccccagtgacaaagggcactgcgtggacctgccagacacaggactctgcaaggagagcatcccgcgctggtactacaaccccttcagcgaacactgcgcccgctttacctatggtggttgttatggcaacaagaacaactttgaggaagagcagcagtgcctcgagtcttgtcgcggcatctccaagaaggatgtgtttggcctgaggcgggaaatccccattcccagcacaggctctgtggagatggctgtcgcagtgttcctggtcatctgcattgtggtggtggtagccatcttgggttactgcttcttcaagaaccagagaaaggacttccacggacaccaccaccacccaccacccacccctgccagctccactgtctccactaccgaggacacggagcacctggtctataaccacaccacccggcccctctgagcctgggtctcaccggctctcacctggccctgcttcctgcttgccaaggcagaggcctgggctgggaaaaactttggaaccagactcttgcctgtttcccaggcccactgtgcctcagagaccagggctccagcccctcttggagaagtctcagctaagctcacgtcctgagaaagctcaaaggtttggaaggagcagaaaacccttgggccagaagtaccagactagatggacctgcctgcataggagtttggaggaagttggagttttgtttcctctgttcaaagctgcctgtccctaccccatggtgctaggaagaggagtggggtggtgtcagaccctggaggccccaaccctgtcctcccgagctcctcttccatgctgtgcgcccagggctgggaggaaggacttccctgtgtagtttgtgctgtaaagagttgctttttgtttatttaatgctgtggcatgggtgaagaggaggggaagaggcctgtttggcctctctgtcctctcttcctcttcccccaagattgagctctctgcccttgatcagccccaccctggcctagaccagcagacagagccaggagaggctcagctgcattccgcagcccccacccccaaggttctccaacatcacagcccagcccacccactgggtaataaaagtggtttgtggaaa

SEQ ID NO: 46 - DNA, 2099 bp, human
aagaagctgccgttgttctgggtactacagcagaagggtatgcggaagcgagcaccccagtctgagatggctcctgccggtgtgagcctgagggccaccatcctctgcctcctggcctgggctggcctggctgcaggtgaccgggtgtacatacaccccttccacctcgtcatccacaatgagagtacctgtgagcagctggcaaaggccaatgccgggaagcccaaagaccccaccttcatacctgctccaattcaggccaagacatcccctgtggatgaaaaggccctacaggaccagctggtgctagtcgctgcaaaacttgacaccgaagacaagttgagggccgcaatggtcgggatgctggccaacttcttgggcttccgtatatatggcatgcacagtgagctatggggcgtggtccatggggccaccgtcctctccccaacggctgtctttggcaccctggcctctctctatctgggagccttggaccacacagctgacaggctacaggcaatcctgggtgttccttggaaggacaagaactgcacctcccggctggatgcgcacaaggtcctgtctgccctgcaggctgtacagggcctgctagtggcccagggcagggctgatagccaggcccagctgctgctgtccacggtggtgggcgtgttcacagccccaggcctgcacctgaagcagccgtttgtgcagggcctggctctctatacccctgtggtcctcccacgctctctggacttcacagaactggatgttgctgctgagaagattgacaggttcatgcaggctgtgacaggatggaagactggctgctccctgatgggagccagtgtggacagcaccctggctttcaacacctacgtccacttccaagggaagatgaagggcttctccctgctggccgagccccaggagttctgggtggacaacagcacctcagtgtctgttcccatgctctctggcatgggcaccttccagcactggagtgacatccaggacaacttctcggtgactcaagtgcccttcactgagagcgcctgcctgctgctgatccagcctcactatgcctctgacctggacaaggtggagggtctcactttccagcaaaactccctcaactggatgaagaaactgtctccccggaccatccacctgaccatgccccaactggtgctgcaaggatcttatgacctgcaggacctgctcgcccaggctgagctgcccgccattctgcacaccgagctgaacctgcaaaaattgagcaatgaccgcatcagggtgggggaggtgctgaacagcattttttttgagcttgaagcggatgagagagagcccacagagtctacccaacagcttaacaagcctgaggtcttggaggtgaccctgaaccgcccattcctgtttgctgtgtatgatcaaagcgccactgccctgcacttcctgggccgcgtggccaacccgctgagcacagcatgaggccagggccccagaacacagtgcctggcaaggcctctgcccctggcctttgaggcaaaggccagcagcagataacaaccccggacaaatcagcgatgtgtcacccccagtctcccaccttttcttctaatgagtcgactttgagctggaaagcagccgtttctccttggtctaagtgtgctgcatggagtgagcagtagaagcctgcagcggcacaaatgcacctcccagtttgctgggtttattttagagaatgggggtggggaggcaagaaccagtgtttagcgcgggactactgttccaaaaagaattccaaccgaccagcttgtttgtgaaacaaaaaagtgttcccttttcaagttgagaacaaaaattgggttttaaaattaaagtatacatttttgcattgccttcggtttgtatttagtgtcttgaatgtaagaacatgacctccgtgtagtgtctgtaataccttagttttttccacagatgcttgtgatttttgaacaatacgtgaaagatgcaagcacctgaatttctgtttgaatgcggaacaatagctggttatttctcccttgtgttagtaataaacgtcttgccac

SEQ ID NO: 47 - DNA, 6400 bp, human
ctgagatgcaggcccagcgctggcgcagtgagaacttcgagagacccgtggacctggagggctctggggatgatgactcctttcccgatgatgaactggatgacctctactcggggtcgggctcgggctgtaagtacccccctccctacctctgcctgggggcagtgaccagtctgtatccagcctcaactctgagaagcccacggggggcttgcttcagtgaggcagggggcattcactgcctgggtcaggcaagttcttcttgctctggatccccagaacaagaagggcagaacatccttctggggatagaacaagacctgggaggacctcagggcccagaatgtccaggtctccagggtcccacgtctgcatctttgtgtgtgctatgtggctttctctgcagaccttgcttggttccggtggtcccgtcaggtgcaataagctgtggccaatggtggggttagggcagtgatgacacagggcaggtgcttcaagtggtgcctgggatggccccgccctggggaaggggagccaggtcagctgggtctagcagaatctcgggagagaagggcaccgcgaaccccactctgccatgtagcaactgtgtgcccctcggtgctccccctccctgaatccctgtattttcacctgtggatggtgagaaatacgacttcttctcagtgcctctaggagggtttgggataggaagctggggtctggcacagaggaggagctctcaaaatggtagcaaaaagaaggcagctgagactgggcccagtgagggcacgggctggcatctgaggagatggtacggggtctgcacgccacagagctggctccccacagccctcgcctctggtctcccctccttagccaagtcctttgagcctctttcaaattaatctttgtaaaacccgtttatattgggtcacatctctattcgcaaagttccctggctcccctccctcctgcctggttccgagcccaggagctggctgtggcttctccctcccccatcccctactccccgtctcatttcctcccaagttccttcactgtcccggctttgcgtcagccagattgctcaagcagttcccctgcctcaagggcttcttttcccttttaccctccgcctctgcctctgggggaagcccttagtgtaccacccctgccttgagcttgtggtaggggtgcctttggggtctgactcttcccagaatgccactcctgtgttcccctgcaagccccagcaagttttgcagccagtagcgcctcagttgctgctgcctggattcaacctcatagaaactgtaggctgggtgggcaggaatagtcaaggaaggcttcccgggagaggcggcccccagaatttttgacttggcagagagaagttggggaacatcagcaactgaccacctttagctggctgtgccttcctcctttctctcatcttttctgggaaaattgggtaaagagagggggttgggagacctaatcttgatggccattgcttacctgggatcctcatgcccctcacaaccacccagctccctagctctctccctctcccccaccccctcagacttcgagcaggagtcgggcattgagacagccatgcgcttcagcccagatgtagccctggcggtgtccaccacacctgcggtgctgcccaccacgaacatccagcctgtgggcacaccatttgaagagctcccctctgagcgccccaccctggagccagccaccagccccctggtggtgacagaagtcccggaagagcccagccagagagccaccaccgtctccactaccatggctaccactgctgccacaagcacaggggacccgactgtggccacagtgcctgccacagtggccaccgccacccccagcacccctgcagcacccccttttacggccaccactgctgttataaggaccactggcgtacggaggcttctgcctctcccactgaccacagtggctacggcacgggccactacccccgaggcgccctccccgcccaccacggcggctgtcttggacaccgaggccccaacacccaggctggtcagcacagctacctcccggccaagagcccttcccaggccggccaccacccaggagcctgacatccctgagaggagcaccctgcccctggggaccactgcccctggacccacagaggtggctcagaccccaactccagagaccttcctgaccacaatccgggatgagccagaggttccggtgagtggggggcccagtggagacttcgagctgccagaagaagagaccacacaaccagacacagccaatgaggtggtagctgtgggaggggctgcggccaaggcatcatctccacctgggacactgcccaagggtgcccgcccgggccctggcctcctggacaatgccatcgactcgggcagctcagctgctcagctgcctcagaagagtatcctggagcggaaggaggtgctcgtagctgtgattgtgggcggggtggtgggcgccctctttgctgccttcttggtcacactgctcatctatcgtatgaagaaaaaggatgagggcagctacacgctggaggaacccaagcaggcgagcgtcacataccagaagcctgacaagcaggaggagttctatgcctagtggagccacagtgcctccctgcagcctcaacaccaccctgctgtccagtccccagcctggccccaccagcccaagcctgggactgggcctggaacctggccccagttcttctctgccctctctcccaaggtctgcccaggctgccagcctcacacagatcttccccgaggaagaggggctgctgccatctgccccagactgtgcccttacgagctcatctcttgttcccctcatccctgccaccagtctggggcttcaggacctcatgtcagatggatgggaggaagaaagctcctgattggctggtggtggaagaaagggtggggcttgagatgagcctgagccctgacttggcacccacagtgctcactgagatctcctttttggggcagagaggcactcaggctggtttccaggacaaacatttggtaaacacagcccttgaaatcatctagacactgcaacctcttgctcgtatcccagggcctctctctagctgggtgagagggtgtcccttgtcaccagcctgttttgtcctggtctctctggggttgttgaatctctcctcttgcctgccaagtacacatgtacccagacttcatttctttctgcatcttcccccaagaaacagcttcctgagggtgctggggcagccactggtgaggaggggctgctctgatgtccctcctatgaggggactctgcacagacaccattgcccacactatcaccatattttcactcagtcacacacaagacaaaagcatgcaatgacaaaaccatacgcaatcctgaccgcccagccaatcaagacatatcacagaacacacgcgtccttccaagaatgtttatcctcatgcatcacttacacacccccagacacgtactgcaatgcaagtcactagtcatggtcacatgacagtgacagtgtggcctcctcctaccccaaatacacccacactctggcaccacacacattgtctccagctttcaggcttactggggagggtggaatcgagccagaacaatcagcccatattgggtccccctaagttgccccgtcatactcagtcccatgccatggtgcccacaccaaccatgcagccaccaaccccagccagtgtcagacacaatcccatgtggatgcacagtctcactccacatgacctgctctcaatgctggagggaaacaggcaggcccttgcctttctcggaaaaagtgtggggccacagcccttttagggcattgcatgcaggtgggcctggcttcacccctacctgcttcctccccaccgcagctggcagagggggaggtttggggccagacccccactagctgggagcctgggggctcctctaaggctgaggaaggaaatttggccccaggttgttggggggtcttgggtctcccaggacggaaggcccagggcagggagggggcatgtggttgggctcctttatctccctgtgtccccttcctgctttgagctagggggctgactctgcctcccaggacacaagtctccaaagtgcctgtgagggcgggccctccgcaccctctgccctctgcctggcaggccaacctcagcccacctgcccagaggccctccctgtggacaccccctcacctatttggccaaacaattctggctgcagcttcaggggccatggctggaagcagcccctgcagatccctcaggccccgaggtcagggtttgagggatgagaccaggtgatagtgggggaggggttacttcctttgttacctagcaagtagggctatttccatcggtattttaaatgtggggtcacagatcttttggggagggtgtgcttggcagggggcctcttggagccaaagggatgtggtgtgagttgcgattggctggcactcacacccccacccctcacccacatcccagattcaagtcaggaaggcaggttttatttcagggcccttttcaagatgccctggcagcagatttctgcaggatgaggggtagcggtgtgtaggcagtgagggggaggttccaggggctgtcccacagcctgtcttttccaggctgggctccatcttccagtcccaaaaccctccttcacagggcccagaggcttgtgaggaagccaggtggacccagccttggaagagtgggcatggggggcccctgatatctggagggggcgggttggcctcagtcatctttggagcagaagggctgggtcctggggccacagaccacaaggctcagcctccctaccctgctccctggggtgctgctgtcttggagagcacagctctggtgagacggcctgggcaggccgaggctgagaaaccagggaggatagaggagaaaagggcttgggcccccagccccagaagatgctgggccccaggtgggagacccaacagtgggtgcagtttctcagtggggctggagccaatggtgggggtggccccggcaggcctggctcctcacatcccaggggttggcttctgatttggggcttgggctccaggcactggcttctcttctctgtgtccttagcatttgagagaagaggccaggggccttgttcatggatccctggacccaaggcagatgtccaggctttatcctcctgaggatgaggagtctgaccagcccaaatctgccctggccggcctgaccggggcaaggcagtccaagagagttcagtgaggaccagctaggctctcccaggtgcaatgtgggtgcagggccctcatgtccccctacccctgcctgtgatggagtgttctgaggggctttggcatttgctggaagcacagggagttccaaatgagagggagcttctgtggcttgagagcctctggggccttggctgccagagcacgaggcaggccaggacctggagagcccagaccctgtctccaggaggccaggaggccagatgggggccttgcctgaaagactggtccccttgatcgctggaggcatgtgggtggcaaccagggctgggcagggcttagggtgtgtgggccaaacccccctggggttggcaaagccgcctgtcaggcctcctggtgggggcccctggacacagggagcagaccctctgcctcatggggtaggagtggctgcctcctgtgttctctggatttcttctcccaacaactacaaccctggacttgcctccccaggcctcttgcctgtaaatagaagcccgcaaactgtacagatttacagaggcatcgagactgggccctgggagttgccatctgagagccgatggccccagcatcccccaggtgcctgcctggcaccacagtgaccctggcctcagcgtggcaaatgcatgtaaatatttttcgtaggcagcgtggctccagagagccccctgaagacagtgtccctccctcctgtgagtcctttctcctgtacagaacctgcctggggtgggtgggggtctgccattccctcccccaggccttccctgccccttctctcccctgtaacctgtttattaaccatacctgtcctgagttcatggccaaaaccttaaataagaaaaacaaaagaaaaagacagtggaaaaaagagaccaaggcgcctgccccactgcgggtactctcctgttccagccttgtgaaggaactggttttgtttttgtttttgttttttttttttttgtttgtttgtttgttttttaacacttcctgtgctgtgcccatttataagaggaaataaaattaagctgaaatg

SEQ ID NO: 48 - DNA, 3890 bp, human
atgaaggtgataagcttattcattttggtgggatttataggagagttccaaagtttttcaagtgcctcctctccagtcaactgccagtgggacttctatgccccttggtcagaatgcaatggctgtaccaagactcagactcgcaggcggtcagttgctgtgtatgggcagtatggaggccagccttgtgttggaaatgcttttgaaacacagtcctgtgaacctacaagaggatgtccaacagaggagggatgtggagagcgtttcaggtgcttttcaggtcagtgcatcagcaaatcattggtttgcaatggggattctgactgtgatgaagacagtgctgatgaagacagatgtgaggactcagaaaggagaccttcctgtgatatcgataaacctcctcctaacatagaacttactggaaatggttacaatgaactcactggccagtttaggaacagagtcatcaataccaaaagttttggtggtcaatgtagaaaggtgtttagtggggatggaaaagatttctacaggctgagtggaaatgtcctgtcctatacattccaggtgaaaataaataatgattttaattatgaattttacaatagtacttggtcttatgtaaaacatacgtcgacagaacacacatcatctagtcggaagcgctccttttttagatcttcatcatcttcttcacgcagttatacttcacataccaatgaaatccataaaggaaagagttaccaactgctggttgttgagaacactgttgaagtggctcagttcattaataacaatccagaatttttacaacttgctgagccattctggaaggagctttcccacctcccctctctgtatgactacagtgcctaccgaagattaatcgaccagtacgggacacattatctgcaatctgggtcgttaggaggagaatacagagttctattttatgtggactcagaaaaattaaaacaaaatgattttaattcagtcgaagaaaagaaatgtaaatcctcaggttggcattttgtcgttaaattttcaagtcatggatgcaaggaactggaaaacgctttaaaagctgcttcaggaacccagaacaatgtattgcgaggagaaccgttcatcagagggggaggtgcaggcttcatatctggccttagttacctagagctggacaatcctgctggaaacaaaaggcgatattctgcctgggcagaatctgtgactaatcttcctcaagtcataaaacaaaagctgacacctttatatgagctggtaaaggaagtaccttgtgcctctgtgaaaaaactatacctgaaatgggctcttgaagagtatctggatgaatttgacccctgtcattgccggccttgtcaaaatggtggtttggctactgttgaggggacccattgtctgtgccattgcaaaccgtacacatttggtgcggcgtgtgagcaaggagtcctcgtagggaatcaagcaggaggggttgatggaggttggagttgctggtcctcttggagcccctgtgtccaagggaagaaaacaagaagccgtgaatgcaataacccacctcccagtgggggtgggagatcctgcgttggagaaacgacagaaagcacacaatgcgaagatgaggagctggagcacttgaggttgcttgaaccacattgctttcctttgtctttggttccaacagaattctgtccatcacctcctgccttgaaagatggatttgttcaagatgaaggtccaatgtttcctgtggggaaaaatgtagtgtacacttgcaatgaaggatactctcttattggaaacccagtggccagatgtggagaagatttacggtggcttgttggggaaatgcattgtcagaaaattgcctgtgttctacctgtactgatggatggcatacagagtcacccccaaaaacctttctacacagttggtgagaaggtgactgtttcctgttcaggtggcatgtccttagaaggtccttcagcatttctctgtggctccagccttaagtggagtcctgagatgaagaatgcccgctgtgtacaaaaagaaaatccgttaacacaggcagtgcctaaatgtcagcgctgggagaaactgcagaattcaagatgtgtttgtaaaatgccctacgaatgtggaccttccttggatgtatgtgctcaagatgagagaagcaaaaggatactgcctctgacagtttgcaagatgcatgttctccactgtcagggtagaaattacacccttactggtagggacagctgtactctgcctgcctcagctgagaaagcttgtggtgcctgcccactgtggggaaaatgtgatgctgagagcagcaaatgtgtctgccgagaagcatcggagtgcgaggaagaagggtttagcatttgtgtggaagtgaacggcaaggagcagacgatgtctgagtgtgaggcgggcgctctgagatgcagagggcagagcatctctgtcaccagcataaggccttgtgctgcggaaacccagtaggctcctggaggccatggtcagcttgcttggaatccagcaggcagctggggctgagtgaaaacatctgcacaactgggcactggacagcttttccttcttctccagtgtctaccttcctcctcaactcccagccatctgtataaacacaatcctttgttctcccaaatctgaatcgaattactcttttgcctcctttttaatgtcagtaaggatatgagcctttgcacaggctggctgcgtgttcttgaaataggtgttaccttctctgggccttggttttttaaaatctgtaaaattagaggattgcactagagaaacttgaatgctccattcaggcctatcattttattaagtatgattgacacagcccatgggccagaacacactctacaaaatgactaggataacagaaagaacgtgatctcctgattagagagggtggttttcctcaatggaaccaaatataaagaggacttgaacaaaaatgacagatacaaactatttctatcctgagtagtaatctcacacttcatcctatagagtcaaccaccacagataggaattccttattctttttttaatttttttaagacagagtctcactttgttgcccaggctggagcgcagtggggtgatctcatctccctgcaacctccgcctcctgggttgaagcgattcttgtgcctcagcttcccaagcagctgggattacaggtgcccgccaccacgcccagctaatttttgcatttttagtagagatgggtttcaccatgttggccatgctcgtctccaactcctgacctcaggtaatccgtctgccttggcctcccaaatgctgggattacagacatgaaccaccacgcctggctggaatacttactcttgtcgggagattgaaccactaaaatgttagagcagaattcattatgctgtggtcacaggggtgtcttgtctgagaacaaatacaattcagtcttctctttggggttttagtatgtgtcaaacataggactggaagtttgcccctgttcttttttcttttgaaagaacatcagttcatgcctgaggcatgagtgactgtgcatttgagatagttttccctattctgtggatacagtcccagagttttcagggagtacacaggtagattagtttgaagcattgaccttttatttattccttatttctctttcatcaaaacaaaacagcagctgtgggaggagaaatgagagggcttaaatgaaatttaaaataagctatattatacaaatactatctctgtattgttctgaccctggtaaatatatttcaaaacttcagatgacaaggattagaacactcattaagatgctattcttc

SEQ ID NO: 49 - DNA, 594 bp, human
gtcactcctgccttcaccatgaagtccagcggcctcttccccttcctggtgctgcttgccctgggaactctggcaccttgggctgtggaaggctctggaaagtccttcaaagctggagtctgtcctcctaagaaatctgcccagtgccttagatacaagaaacctgagtgccagagtgactggcagtgtccagggaagaagagatgttgtcctgacacttgtggcatcaaatgcctggatcctgttgacaccccaaacccaacaaggaggaagcctgggaagtgcccagtgacttatggccaatgtttgatgcttaacccccccaatttctgtgagatggatggccagtgcaagcgtgacttgaagtgttgcatgggcatgtgtgggaaatcctgcgtttcccctgtgaaagcttgattcctgccatatggaggaggctctggagtcctgctctgtgtggtccaggtcctttccaccctgagacttggctccaccactgatatcctcctttggggaaaggcttggcacacagcaggctttcaagaagtgccagttgatcaatgaataaataaacgagcctatttctctttgcac

SEQ ID NO: 50 - DNA, 5784 bp, human
acggcatccagtacagaggggctggacttggacccctgcagcagccctgcacaggagaagcggcatataaagccgcgctgcccgggagccgctcggccacgtccaccggagcatcctgcactgcagggccggtctctcgctccagcagagcctgcgcctttctgactcggtccggaacactgaaaccagtcatcactgcatctttttggcaaaccaggagctcagctgcaggaggcaggatggtctggaggctggtcctgctggctctgtgggtgtggcccagcacgcaagctggtcaccaggacaaagacacgaccttcgaccttttcagtatcagcaacatcaaccgcaagaccattggcgccaagcagttccgcgggcccgaccccggcgtgccggcttaccgcttcgtgcgctttgactacatcccaccggtgaacgcagatgacctcagcaagatcaccaagatcatgcggcagaaggagggcttcttcctcacggcccagctcaagcaggacggcaagtccaggggcacgctgttggctctggagggccccggtctctcccagaggcagttcgagatcgtctccaacggccccgcggacacgctggatctcacctactggattgacggcacccggcatgtggtctccctggaggacgtcggcctggctgactcgcagtggaagaacgtcaccgtgcaggtggctggcgagacctacagcttgcacgtgggctgcgacctcataggaccagttgctctggacgagcccttctacgagcacctgcaggcggaaaagagccggatgtacgtggccaaaggctctgccagagagagtcacttcaggggtttgcttcagaacgtccacctagtgtttgaaaactctgtggaagatattctaagcaagaagggttgccagcaaggccagggagctgagatcaacgccatcagtgagaacacagagacgctgcgcctgggtccgcatgtcaccaccgagtacgtgggccccagctcggagaggaggcccgaggtgtgcgaacgctcgtgcgaggagctgggaaacatggtccaggagctctcggggctccacgtcctcgtgaaccagctcagcgagaacctcaagagagtgtcgaatgataaccagtttctctgggagctcattggtggccctcctaagacaaggaacatgtcagcttgctggcaggatggccggttctttgcggaaaatgaaacgtgggtggtggacagctgcaccacgtgtacctgcaagaaatttaaaaccatttgccaccaaatcacctgcccgcctgcaacctgcgccagtccatcctttgtggaaggcgaatgctgcccttcctgcctccactcggtggacggtgaggagggctggtctccgtgggcagagtggacccagtgctccgtgacgtgtggctctgggacccagcagagaggccggtcctgtgacgtcaccagcaacacctgcttggggccctcgatccagacacgggcttgcagtctgagcaagtgtgacacccgcatccggcaggacggcggctggagccactggtcaccttggtcttcatgctctgtgacctgtggagttggcaatatcacacgcatccgtctctgcaactccccagtgccccagatggggggcaagaattgcaaagggagtggccgggagaccaaagcctgccagggcgccccatgcccaatcgatggccgctggagcccctggtccccgtggtcggcctgcactgtcacctgtgccggtgggatccgggagcgcacccgggtctgcaacagccctgagcctcagtacggagggaaggcctgcgtgggggatgtgcaggagcgtcagatgtgcaacaagaggagctgccccgtggatggctgtttatccaacccctgcttcccgggagcccagtgcagcagcttccccgatgggtcctggtcatgcggcttctgccctgtgggcttcttgggcaatggcacccactgtgaggacctggacgagtgtgccctggtccccgacatctgcttctccaccagcaaggtgcctcgctgtgtcaacactcagcctggcttccactgcctgccctgcccgccccgatacagagggaaccagcccgtcggggtcggcctggaagcagccaagacggaaaagcaagtgtgtgagcccgaaaacccatgcaaggacaagacacacaactgccacaagcacgcggagtgcatctacctgggtcacttcagcgaccccatgtacaagtgcgagtgccagacaggctacgcgggcgacgggctcatctgcggggaggactcggacctggacggctggcccaacctcaatctggtctgcgccaccaacgccacctaccactgcatcaaggataactgcccccatctgccaaattctgggcaggaagactttgacaaggacgggattggcgatgcctgtgatgatgacgatgacaatgacggtgtgaccgatgagaaggacaactgccagctcctcttcaatccccgccaggctgactatgacaaggatgaggttggggaccgctgtgacaactgcccttacgtgcacaaccctgcccagatcgacacagacaacaatggagagggtgacgcctgctccgtggacattgatggggacgatgtcttcaatgaacgagacaattgtccctacgtctacaacactgaccagagggacacggatggtgacggtgtgggggatcactgtgacaactgccccctggtgcacaaccctgaccagaccgacgtggacaatgaccttgttggggaccagtgtgacaacaacgaggacatagatgacgacggccaccagaacaaccaggacaactgcccctacatctccaacgccaaccaggctgaccatgacagagacggccagggcgacgcctgtgaccctgatgatgacaacgatggcgtccccgatgacagggacaactgccggcttgtgttcaacccagaccaggaggacttggacggtgatggacggggtgatatttgtaaagatgattttgacaatgacaacatcccagatattgatgatgtgtgtcctgaaaacaatgccatcagtgagacagacttcaggaacttccagatggtccccttggatcccaaagggaccacccaaattgatcccaactgggtcattcgccatcaaggcaaggagctggttcagacagccaactcggaccccggcatcgctgtaggttttgacgagtttgggtctgtggacttcagtggcacattctacgtaaacactgaccgggacgacgactatgctggcttcgtctttggttaccagtcaagcagccgcttctatgtggtgatgtggaagcaggtgacgcagacctactgggaggaccagcccacgcgggcctatggctactccggcgtgtccctcaaggtggtgaactccaccacggggacgggcgagcacctgaggaacgcgctgtggcacacggggaacacgccggggcaggtgcgaaccttatggcacgaccccaggaacattggctggaaggactacacggcctataggtggcacctgactcacaggcccaagaccggctacatcagagtcttagtgcatgaaggaaaacaggtcatggcagactcaggacctatctatgaccaaacctacgctggcgggcggctgggtctatttgtcttctctcaagaaatggtctatttctcagacctcaagtacgaatgcagagatatttaaacaagatttgctgcatttccggcaatgccctgtgcatgccatggtccctagacacctcagttcattgtggtccttgcggcttctctctctagcagcacctcctgtcccttgaccttaactctgatggttcttcacctcctgccagcaaccccaaacccaagtgccttcagaggataaatatcaatggaactcagagatgaacatctaacccactagaggaaaccagtttggtgatatatgagactttatgtggagtgaaaattgggcatgccattacattgctttttcttgtttgtttaaaaagaatgacgtttacatataaaatgtaattacttattgtatttatgtgtatatggagttgaagggaatactgtgcataagccattatgataaattaagcatgaaaaatattgctgaactacttttggtgcttaaagttgtcactattcttgaattagagttgctctacaatgacacacaaatcccgctaaataaattataaacaagggtcaattcaaatttgaagtaatgttttagtaaggagagattagaagacaacaggcatagcaaatgacataagctaccgattaactaatcggaacatgtaaaacagttacaaaaataaacgaactctcctcttgtcctacaatgaaagccctcatgtgcagtagagatgcagtttcatcaaagaacaaacatccttgcaaatgggtgtgacgcggttccagatgtggatttggcaaaacctcatttaagtaaaaggttagcagagcaaagtgcggtgctttagctgctgcttgtgccgttgtggcgtcggggaggctcctgcctgagcttccttccccagctttgctgcctgagaggaaccagagcagacgcacaggccggaaaaggcgcatctaacgcgtatctaggctttggtaactgcggacaagttgcttttacctgatttgatgatacatttcattaaggttccagttataaatattttgttaatatttattaagtgactatagaatgcaactccatttaccagtaacttattttaaatatgcctagtaacacatatgtagtataatttctagaaacaaacatctaataagtatataatcctgtgaaaatatgaggcttgataatattaggttgtcacgatgaagcatgctagaagctgtaacagaatacatagagaataatgaggagtttatgatggaaccttaatatataatgttgccagcgattttagttcaatatttgttactgttatctatctgctgtatatggaattcttttaattcaaacgctgaaaacgaatcagcatttagtcttgccaggcacacccaataatcagtcatgtgtaatatgcacaagtttgtttttgtttttgttttttttgttggttggtttttttgctttaagttgcatgatctttctgcaggaaatagtcactcatcccactccacataaggggtttagtaagagaagtctgtctgtctgatgatggatagggggcaaatctttttcccctttctgttaatagtcatcacatttctatgccaaacaggaacgatccataactttagtcttaatgtacacattgcattttgataaaattaattttgttgtttcctttgaggttgatcgttgtgttgttttgctgcactttttacttttttgcgtgtggagctgtattcccgagacaacgaagcgttgggatacttcattaaatgtagcgactgtcaacagcgtgcaggttttctgtttctgtgttgtggggtcaaccgtacaatggtgtgggaatgacgatgatgtgaatatttagaatgtaccatattttttgtaaattatttatgtttttctaaacaaatttatcgtataggttgatgaaacgtcatgtgttttgccaaagactgtaaatatttatttatgtgttcacatggtcaaaatttcaccactgaaaccctgcacttagctagaacctcatttttaaagattaacaacaggaaataaattgtaaaaaaggttttct

SEQ ID NO: 51 - DNA, 3442 bp, human
agccggtgcgccgcagactagggcgcctcgggccagggagcgcggaggagccatggccaccgctaacggggccgtggaaaacgggcagccggacgggaagccgccggccctgccgcgccccatccgcaacctggaggtcaagttcaccaagatatttatcaacaatgaatggcacgaatccaagagtgggaaaaagtttgctacatgtaacccttcaactcgggagcaaatatgtgaagtggaagaaggagataagcccgacgtggacaaggctgtggaggctgcacaggttgccttccagaggggctcgccatggcgccggctggatgccctgagtcgtgggcggctgctgcaccagctggctgacctggtggagagggaccgcgccaccttggccgccctggagacgatggatacagggaagccatttcttcatgcttttttcatcgacctggagggctgtattagaaccctcagatactttgcagggtgggcagacaaaatccagggcaagaccatccccacagatgacaacgtcgtatgcttcaccaggcatgagcccattggtgtctgtggggccatcactccatggaacttccccctgctgatgctggtgtggaagctggcacccgccctctgctgtgggaacaccatggtcctgaagcctgcggagcagacacctctcaccgccctttatctcggctctctgatcaaagaggccgggttccctccaggagtggtgaacattgtgccaggattcgggcccacagtgggagcagcaatttcttctcaccctcagatcaacaagatcgccttcaccggctccacagaggttggaaaactggttaaagaagctgcgtcccggagcaatctgaagcgggtgacgctggagctgggggggaagaacccctgcatcgtgtgtgcggacgctgacttggacttggcagtggagtgtgcccatcagggagtgttcttcaaccaaggccagtgttgcacggcagcctccagggtgttcgtggaggagcaggtctactctgagtttgtcaggcggagcgtggagtatgccaagaaacggcccgtgggagaccccttcgatgtcaaaacagaacaggggcctcagattgatcaaaagcagttcgacaaaatcttagagctgatcgagagtgggaagaaggaaggggccaagctggaatgcgggggctcagccatggaagacaaggggctcttcatcaaacccactgtcttctcagaagtcacagacaacatgcggattgccaaagaggagattttcgggccagtgcaaccaatactgaagttcaaaagtatcgaagaagtgataaaaagagcgaatagcaccgactatggactcacagcagccgtgttcacaaaaaatctcgacaaagccctgaagttggcttctgccttagagtctggaacggtctggatcaactgctacaacgccctctatgcacaggctccatttggtggctttaaaatgtcaggaaatggcagagaactaggtgaatacgctttggccgaatacacagaagtgaaaactgtcaccatcaaacttggcgacaagaacccctgaaggaaaggcggggctccttcctcaaacatcggacggcggaatgtggcagatgaaatgtgctggaggaaaaaaatgacatttctgaccttcccgggacacattcttctggaggctttacatctactggagttgaatgattgctgttttcctctcactctcctgtttattcaccagactggggatgcctataggttgtctgtgaaatcgcagtcctgcctggggagggagctgttggccatttctgtgtttccctttaaaccagatcctggagacagtgagatactcagggcgttgttaacagggagtggtatttgaagtgtccagcagttgcttgaaatgctttgccgaatctgactccagtaagaatgtgggaaaaccccctgtgtgttctgcaagcagggctcttgcaccagcggtctcctcagggtggacctgcttacagagcaagccacgcctctttccgaggtgaaggtgggaccattccttgggaaaggattcacagtaaggttttttggtttttgttttttgttttcttgtttttaaaaaaaggatttcacagtgagaaagttttggttagtgcataccgtggaagggcgccagggtctttgtggattgcatgttgacattgaccgtgagattcggcttcaaaccaatactgcctttggaatatgacagaatcaatagcccagagagcttagtcaaagacgatatcacggtctaccttaaccaaggcactttcttaagcagaaaatattgttgaggttacctttgctgctaaagatccaatcttctaacgccacaacagcatagcaaatcctaggataattcacctcctcatttgacaaatcagagctgtaattcactttaacaaattacgcatttctatcacgttcactaacagcttatgataagtctgtgtagtcttccttttctccagttctgttacccaatttagattagtaaagcgtacacaactggaaagactgctgtaataacacagccttgttatttttaagtcctattttgatattaatttctgattagttagtaaataacacctggattctatggaggacctcggtcttcatccaagtggcctgagtatttcactggcaggttgtgaatttttcttttcctctttgggaatccaaatgatgatgtgcaatttcatgttttaacttgggaaactgaaagtgttcccatatagcttcaaaaacaaaaacaaatgtgttatccgacggatacttttatggttactaactagtactttcctaattgggaaagtagtgcttaagtttgcaaattaagttggggagggcaataataaaatgagggcccgtaacagaaccagtgtgtgtataacgaaaaccatgtataaaatgggcctatcacccttgtcagagatataaattaccacatttggcttcccttcatcagctaacacttatcacttatactaccaataacttgttaaatcaggatttggcttcatacactgaattttcagtattttatctcaagtagatatagacactaaccttgatagtgatacgttagagggttcctattcttccattgtacgataatgtctttaatatgaaatgctacattatttataattggtagagttattgtatctttttatagttgtaagtacacagaggtggtatatttaaacttctgtaatatactgtatttagaaatggaaatatatatagtgttaggtttcacttcttttaaggtttacccctgtggtgtggtttaaaaatctataggcctgggaattccgatcctagctgcagatcgcatcccacaatgcgagaatgataaaataaaattggatatttgaga

SEQ ID NO: 52 - DNA, 852 bp, human
ggacggtcctttgttgccgcgaggggtaggagtgggcgtggcggagccagctccgttcggaacactcccgggccgacccgactcgctcatcctgcaggagctgcggcgccaagatgagtggagaggagaacccagccagcaagcccacgccggtgcaggacgtacagggcgacgggcgctggatgtccctgcaccatcggttcgtggctgacagcaaagataaggaacccgaagtcgtcttcatcggggactccttggtccagctcatgcaccagtgcgagatctggcgcgagctcttctctcctctgcatgcacttaactttggcattggtggtgacggcacacagcatgtactgtggcggctggagaatggggagctggaacacatccggcccaagattgtggtggtctgggtgggcaccaacaaccacggacacacagcagagcaggtgactggtggcatcaaggccattgtgcaactggtgaatgagcgacagccccaggcccgggttgtggtgctgggcctgcttccgcgaggccaacatcccaacccacttcgggagaagaaccgacaggtgaacgagctggtacgggcggcactggctggccaccctcgggcccacttcctagatgccgaccctggctttgtgcactcagatggcaccatcagccatcatgacatgtatgattacctgcatctgagccgcctgggctacacacctgtttgccgggctctgcactccctgcttctgcgtctgctggcccaagaccagggccaaggtgctcccctgctggagcccgcaccctaagcatcctgctgccttcccacaacattaaactctccttcctcag

SEQ ID NO: 53 - DNA, 3171 bp, human
gcggaacaccggcccgccgtcgcggcagctgcttcacccctctctctgcagccatggggctccctcgtggacctctcgcgtctctcctccttctccaggtttgctggctgcagtgcgcggcctccgagccgtgccgggcggtcttcagggaggctgaagtgaccttggaggcgggaggcgcggagcaggagcccggccaggcgctggggaaagtattcatgggctgccctgggcaagagccagctctgtttagcactgataatgatgacttcactgtgcggaatggcgagacagtccaggaaagaaggtcactgaaggaaaggaatccattgaagatcttcccatccaaacgtatcttacgaagacacaagagagattgggtggttgctccaatatctgtccctgaaaatggcaagggtcccttcccccagagactgaatcagctcaagtctaataaagatagagacaccaagattttctacagcatcacggggccgggggcagacagcccccctgagggtgtcttcgctgtagagaaggagacaggctggttgttgttgaataagccactggaccgggaggagattgccaagtatgagctctttggccacgctgtgtcagagaatggtgcctcagtggaggaccccatgaacatctccatcatcgtgaccgaccagaatgaccacaagcccaagtttacccaggacaccttccgagggagtgtcttagagggagtcctaccaggtacttctgtgatgcaggtgacagccacagatgaggatgatgccatctacacctacaatggggtggttgcttactccatccatagccaagaaccaaaggacccacacgacctcatgttcacaattcaccggagcacaggcaccatcagcgtcatctccagtggcctggaccgggaaaaagtccctgagtacacactgaccatccaggccacagacatggatggggacggctccaccaccacggcagtggcagtagtggagatccttgatgccaatgacaatgctcccatgtttgacccccagaagtacgaggcccatgtgcctgagaatgcagtgggccatgaggtgcagaggctgacggtcactgatctggacgcccccaactcaccagcgtggcgtgccacctaccttatcatgggcggtgacgacggggaccattttaccatcaccacccaccctgagagcaaccagggcatcctgacaaccaggaagggtttggattttgaggccaaaaaccagcacaccctgtacgttgaagtgaccaacgaggccccttttgtgctgaagctcccaacctccacagccaccatagtggtccacgtggaggatgtgaatgaggcacctgtgtttgtcccaccctccaaagtcgttgaggtccaggagggcatccccactggggagcctgtgtgtgtctacactgcagaagaccctgacaaggagaatcaaaagatcagctaccgcatcctgagagacccagcagggtggctagccatggacccagacagtgggcaggtcacagctgtgggcaccctcgaccgtgaggatgagcagtttgtgaggaacaacatctatgaagtcatggtcttggccatggacaatggaagccctcccaccactggcacgggaacccttctgctaacactgattgatgtcaacgaccatggcccagtccctgagccccgtcagatcaccatctgcaaccaaagccctgtgcgccacgtgctgaacatcacggacaaggacctgtctccccacacctcccctttccaggcccagctcacagatgactcagacatctactggacggcagaggtcaacgaggaaggtgacacagtggtcttgtccctgaagaagttcctgaagcaggatacatatgacgtgcacctttctctgtctgaccatggcaacaaagagcagctgacggtgatcagggccactgtgtgcgactgccatggccatgtcgaaacctgccctggaccctggaaaggaggtttcatcctccctgtgctgggggctgtcctggctctgctgttcctcctgctggtgctgcttttgttggtgagaaagaagcggaagatcaaggagcccctcctactcccagaagatgacacccgtgacaacgtcttctactatggcgaagaggggggtggcgaagaggaccaggactatgacatcacccagctccaccgaggtctggaggccaggccggaggtggttctccgcaatgacgtggcaccaaccatcatcccgacacccatgtaccgtcctaggccagccaacccagatgaaatcggcaactttataattgagaacctgaaggcggctaacacagaccccacagccccgccctacgacaccctcttggtgttcgactatgagggcagcggctccgacgccgcgtccctgagctccctcacctcctccgcctccgaccaagaccaagattacgattatctgaacgagtggggcagccgcttcaagaagctggcagacatgtacggtggcggggaggacgactaggcggcctgcctgcagggctggggaccaaacgtcaggccacagagcatctccaaggggtctcagttcccccttcagctgaggacttcggagcttgtcaggaagtggccgtagcaacttggcggagacaggctatgagtctgacgttagagtggttgcttccttagcctttcaggatggaggaatgtgggcagtttgacttcagcactgaaaacctctccacctgggccagggttgcctcagaggccaagtttccagaagcctcttacctgccgtaaaatgctcaaccctgtgtcctgggcctgggcctgctgtgactgacctacagtggactttctctctggaatggaaccttcttaggcctcctggtgcaacttaatttttttttttaatgctatcttcaaaacgttagagaaagttcttcaaaagtgcagcccagagctgctgggcccactggccgtcctgcatttctggtttccagaccccaatgcctcccattcggatggatctctgcgtttttatactgagtgtgcctaggttgccccttattttttattttccctgttgcgttgctatagatgaagggtgaggacaatcgtgtatatgtactagaacttttttattaaagaaa

SEQ ID NO: 54 - DNA, 4071 bp, human
gagtccagccgctggtgcgcggagcggttcaccgtcttcggagcggttcggcccagcctttcgcccaggcgcccaggcccgctgcgcgcgtgcgtgagcgcgcctgcgccgccagggccgctgcaaggggaggagagcggccgcctcaggaggatcccttttcccccagaaattactcaatgctgaaacctctcaaagtggtattagagacgctgaaagcaccatggacgggttttatgatcagcaagtcccttttatggtcccagggaaatctcgatctgaggaatgcagagggcggcctgtgattgacagaaagaggaagtttttggacacagatctggctcacgattctgaagagctatttcaggatctcagtcaacttcaagaggcttggttagctgaagcacaagttcctgatgatgaacagtttgtcccagattttcagtctgataacctggtgcttcatgccccacctccaaccaagatcaaacgggagctgcacagcccctcctctgagctgtcgtcttgtagccatgagcaggctcttggtgctaactatggagaaaagtgcctctacaactattgtgcctatgataggaagcctccctctgggttcaagccattaacccctcctacaacccccctctcacccacccatcagaatcccctatttcccccacctcaggcaactctgcccacctcagggcatgcccctgcagctggcccagttcaaggtgtgggccccgcccccgccccccattcgcttccagagcctggaccacagcagcaaacatttgcggtcccccgaccaccacatcagcccctgcagatgccaaagatgatgcctgaaaaccagtatccatcagaacagagatttcagagacaactgtctgaaccctgccaccccttccctcctcagccaggagttcctggagataatcgccccagttaccatcggcaaatgtcagaacctattgtccctgcagctcccccgccccctcagggattcaaacaagaataccatgacccactctatgaacatggggtcccgggcatgccagggcccccagcacacgggttccagtcaccaatgggaatcaagcaggagcctcgggattactgcgtcgattcagaagtgcctaactgccagtcatcctacatgagagggggttatttctccagcagccatgaaggtttttcatatgaaaaagatccccgattatactttgacgacacttgtgttgtgcctgagagactggaaggcaaagtcaaacaggagcctaccatgtatcgagaggggcccccttaccagaggcgaggttcccttcagctgtggcagttcctggtcacccttcttgatgacccagccaatgcccacttcattgcctggacaggtcgaggcatggagttcaagctgatagaaccggaagaggttgctcggcgctggggcatccagaagaaccggccagccatgaactatgacaagctgagccgctctctccgctattactatgaaaagggcatcatgcagaaggtggctggagagcgatacgtctacaaatttgtctgtgacccagatgccctcttctccatggctttcccggataaccagcgtccgttcctgaaggcagagtccgagtgccacctcagcgaggaggacaccctgccgctgacccactttgaagacagccccgcttacctcctggacatggaccgctgcagcagcctcccctatgccgaaggctttgcttactaagtttctgagtggcggagtggccaaaccctagagctagcagttcccattcaggcaaacaagggcagtggttttgtttgtgtttttggttgttcctaaagcttgccctttgagtattatctggagaacccaagctgtctctggattggcacccttaaagacagatacattggctggggagtgggaacagggaggggcagaaaaccaccaaaaggccagtgcctcaactcttgattctgatgaggtttctgggaagagatcaaaatggagtctccttaccatggacaatacatgcaaagcaatatcttgttcaggttagtacccgcaaaacgggacatgatgtgacaatctcgatcgatcatggactactaaatggcctttacatagaagggctctgatttgcacaatttgttgaaaaatcacaaacccatagaaaagtgagtaggctaagttggggaggctcaaaccattaagggttaaaaatacatcttaaacattggaaagctcttctagctgaatctgaaatattaccccttgtctagaaaaaggggggcagtcagaacagctgttccccactccgtgttctcaaaatcataaaccatggctactcttgggaaccacccggccatgtggtcgccaagtagagcaagccccctttctcttcccaatcacgtggctgagtgtggatgacttttattttaggagaagggcgattaacacttttgacagtattttgttttgccctgatttgggggattgttttgttttggtggttgttttggaaaaacagtttataaactgatttttgtagttttggtatttaaagcaaaaaaacgaaaaacaaaaaacaaaaacaaaccttttggtaatgtgcactgtgtctttagccagggccgtgcaacttatgaagacactgcagcttgagaggggctttgctgaggcttccccttggccatgtgaaagcccgccttgttgcctgctttgtgctttctgcaccagacaacctgatggaacatttgcacctgagttgtacatttttgaagtgtgcagggcagcctggacacaagcttagattctctatgtatagttccccgtgttcactaacatgccctctctggaaagcatatgtatataacatgtgtcatgtcctttggaaacctggtcacctggtgaaaacccttgggattcttccctgggcatgactgatgacaatttccatttcatcagtttgttttgttttcctttttctttaaatcttggactttaaaccctacctgtgtgattcagtagggtttgagacttagctgtgatactgacaggtaagcaacagtgctagcattctagattcctgcctttttttaaaaagaaattattctcattgctgtattatattggaaaagttttaaacaaccaagctaaagctatgtgaaagttgagctcaaagtagaggaaaagttactggtggtaccttgctgcctgctctgctggtagaattctgtgctccccgtgacacttagtacattaagaatgactacactgttcctcgtatgtgaaggaggcagtgctgactccgtgagtgtgagacacgtgctttgaactgcttttctattcatggagcactccatagtctcaaactgtcccccttatgaccaacagcacatttgtgaagaggttcgcagggataaggggtgcactttatagctatggaaacatgagattctcctctattggaagctaattagcccacaaaggtggtaaacctgtagattgggccttaattagcattgtactctaatcaaaggactctttctaaaccatatttatagctttcttaacctacacatagtctatacatagatgcatattttacccccagctggctagagatttatttgttgtaaatgctgtatagatttggttttcctttctttacttaccctggtttggattttttttttttttttttttgaatggatttatgctgtcttagcaatatgacaataatcctctgtagcttgagctacccctcccctgctgtaacttacgtgacctgtgctgtcactgggcataggacagcggcatcacggttgcattcccattggactcatgcacctcccggatggtttttgtttttttcgggggttctttggggtttgtttgtttgcttcttttccagagtgtggaaagtctacagtgcagaaaggcttgaacctgccagctgatttgaaatactttcaccctgcgcagggccgtatgcatcctgccaagctgcgttatattctgtactgtgtacaataaagaagtttgcttttcgttta

SEQ ID NO: 55 - DNA, 2239 bp, human
aagcttggcacgaggacggtccgcagcggcaggtgaagcctagcagaggacgcggccaggcgattcggtgaagcgattcctgcaggcgttggttcccctctttgacctggatttgaatttgttgaaatgagcagtcgtaaatcaaagagtaacagcttaattcacacagagtgcctttcacaggtacaaagaattttacgtgaaagattttgtcgtcagagtccacatagtaacctatttggagtgcaagtacaatacaaacacttaagtgagctgctgaaaagaactgctctccatggagagagtaactctgtccttattatcggaccccgaggatcaggaaaaactatgttaataagtcatgctttgaaagaactcatggaaatagaagaagtgagtgaaaatgtattacaagttcacttaaatggactgctgcagatcaatgacaaaatcgccctaaaggaaatcacaaggcagttaaatctggaaaatgtagttggagataaagtttttggaagctttgctgaaaacctttcatttcttctggaagctttaaaaaaaggtgaccgaactagcagttgcccagtgatcttcatattagatgaatttgatctttttgctcatcataaaaaccaaacacttctctataatctttttgacatttctcagtctgcacagaccccaatagcagttattggtcttacatgtagattggatattttggaactcttagaaaaaagagtgaagtcaagattttctcaccggcagatacacttaatgaattcatttggttttccacagtatgttaaaatatttaaagaacagttatctctacctgcagagtttccagacaaggtttttgctgagaagtggaatgaaaatgttcagtatctctcagaagatagaagtgtgcaagaagtactacagaagcatttcaatatcagcaaaaacctgcggtcattacacatgctattgatgcttgctttaaatcgagtaacagcatcgcacccatttatgactgccgtagatctaatggaagcaagccaactgtgtagcatggactcgaaagcaaatattgtacatggtctatcagtcttggaaatctgtcttataatagcaatgaaacatttaaatgacatctatgaggaagagccatttaattttcaaatggtctataatgagtttcagaagtttgttcaaaggaaagcacattccgtttataattttgaaaaacctgttgtcatgaaggcttttgaacacctgcagcaattagaattaataaagcccatggaaagaacttcaggaaattcacagagagagtaccagctgatgaaactgcttttggataatactcaaattatgaatgctctgcagaaatatcccaactgtcctacagatgtgaggcagtgggcaacatcctcactaagctggttatgaatataaccagtgacttcaactttggcatttcattcatacttctgtagagaacggaaaactattgtccattaacatgatatgctaaacattctataaacattcttgtatttatgtgagacttgcccatctactgtcttggctgtgtcttgccttttaatcatgaacagttacatgatttataatttcactgattgagattactttgtaagtagctgttcagaagaataaaatatgactgttttagggactagaccatgtgcttttttaacacttatatatataatggtctatttgaagagctcacttcaacctaacagctagatgtctttacaaaccttaaaccaaaggagtaaaaaaaacaatggtaagcactgaagtataataagtaacctttggtacagcaggtttgctgcagtgtttttttctgtccacatgcaaattttggattctatcccagacccaggttttctagttcagaagactaaccagcttagtcagaagatggttccatggaagaaaaaggccaaggagtttgaagatttttcttctagatctagacatctcaaaatgtggtactcataccatccacatcagaatcccttgtaggattttctaaaattacagattgttgagcctaccataggtcaaaaggactggaattttccttcttaacaagtatagtcatggcaccacgtaacattttggtcaatgacattgtataaagggtggtctcataagattataccatatttttactgtaccttttctatgtctaaatatacaaatgttttaccattgaaaa

SEQ ID NO: 56 - DNA, 507 bp, human
  misc_feature (461)..(461): n is a, c, g, or t
caggtgtggcaaaatacttattacaaagaaagcaactgcaaccctagagaggggtaagccttctctgggcaatagtcatggacatttacagaggggaaggaagtaaacgttaataaataattctgtaaataaatgctagtacatcataataacataccacttagacactaccatggctttacagcaggttttctctaattcactggaaccatgctattcctgtagagcagctgattctttggtcatagtaccttcaacaaataaactatagaactagagaaactttctaagggaggaaaaagaaaaatcaaagtgatactattagttctgaagttgtgccacttgcggagattttaactttagggattacagagtttcaaggttaggaaatcacaaagctctaggtctcagtgggctaaactttcactcctttctcttcctctacagaagaatattctgtntatcaccctgaacttcaaagggactgtaactggaacaagctcatga

SEQ ID NO: 57 - DNA, 478 bp, human
  misc_feature (37)..(37): n is a, c, g, or t
  misc_feature (307)..(307): n is a, c, g, or t
gcgaccgacacgtcctccatgtccgcgcccagccggnctcgcgccgcctgcagctccttggacagccgtgcccgcgtctcctccgccaccggggtcagttgttcctccagttccgatttgtaggccttcaactccttcatggtctcgtccatcagcgccctcagttcctgggtgacctgggagctcgagcagctcctcctgcacctgctcagacagtgtctgcacccagcgcaggtaatcccaaaagcgacccagtgccagttcccagcgctggccgctctgccactcggtctgctggcgcagtcgnggctccggctctgtctccaccgcttgctccaccttggcctggcatcctgccaggaatgtgaccagcaacgcagcccacagaaccttcatcttcctgcctgtgattggccagtcggctcctggggaaggacgtccttcaacctcgtgccgaattcttggcctcgaaggcaaa

SEQ ID NO: 58 - DNA, 1156 bp, human
cgcagcggaggtgaaggacgtccttccccaggagccgactggccaatcacaggcaggaagatgaaggttctgtgggctgcgttgctggtcacattcctggcaggatgccaggccaaggtggagcaagcggtggagacagagccggagcccgagctgcgccagcagaccgagtggcagagcggccagcgctgggaactggcactgggtcgcttttgggattacctgcgctgggtgcagacactgtctgagcaggtgcaggaggagctgctcagctcccaggtcacccaggaactgagggcgctgatggacgagaccatgaaggagttgaaggcctacaaatcggaactggaggaacaactgaccccggtggcggaggagacgcgggcacggctgtccaaggagctgcaggcggcgcaggcccggctgggcgcggacatggaggacgtgtgcggccgcctggtgcagtaccgcggcgaggtgcaggccatgctcggccagagcaccgaggagctgcgggtgcgcctcgcctcccacctgcgcaagctgcgtaagcggctcctccgcgatgccgatgacctgcagaagcgcctggcagtgtaccaggccggggcccgcgagggcgccgagcgcggcctcagcgccatccgcgagcgcctggggcccctggtggaacagggccgcgtgcgggccgccactgtgggctccctggccggccagccgctacaggagcgggcccaggcctggggcgagcggctgcgcgcgcggatggaggagatgggcagccggacccgcgaccgcctggacgaggtgaaggagcaggtggcggaggtgcgcgccaagctggaggagcaggcccagcagatacgcctgcaggccgaggccttccaggcccgcctcaagagctggttcgagcccctggtggaagacatgcagcgccagtgggccgggctggtggagaaggtgcaggctgccgtgggcaccagcgccgcccctgtgcccagcgacaatcactgaacgccgaagcctgcagccatgcgaccccacgccaccccgtgcctcctgcctccgcgcagcctgcagcgggagaccctgtccccgccccagccgtcctcctggggtggaccctagtttaataaagattcaccaagtttcacgc

SEQ ID NO: 59 - DNA, 6154 bp, human
cgagcgccaccatgaactcgctcttcaggaagagaaacaaaggcaaatacagccccactgtgcagacccggagcatctctaacaaggagctctcggagctgatcgagcagctgcagaagaatgccgaccaggtggagaagaacatcgtggacacagaggccaagatgcagagtgacctggctcggctgcaggagggtcggcagcctgagcaccgggacgtgaccctgcagaaggtgttggactctgagaagctgctctatgtgctagaggcggatgcggccattgccaagcacatgaagcacccacagggggacatgatcgccgaggatatccgccagctgaaggagcgtgtgaccaacctgcgcgggaaacacaagcagatctacaggctggcggtgaaggaagtggatccacaggtcaactgggcggcactggtggaggagaagctggacaagctgaacaaccagagctttgggactgacctgccgctggtggaccaccaagtggaggagcataacatcttccacaatgaggtcaaggccatcgggccccacctggccaaggacggggacaaggagcagaacagcgaactccgggccaagtaccagaaactgctggcagcatcacaggcccggcagcagcacctgagttcgctgcaggactacatgcagcgctgcaccaatgagctgtactggctggaccagcaggccaagggccgcatgcagtacgactggagtgaccgcaacctcgactaccccagccgccggcgccagtatgagaatttcatcaaccggaacctggaggccaaagaggagagaatcaacaaactgcacagcgagggcgaccagctgctggcggccgagcaccccgggaggaactccattgaggcgcacatggaggctgtgcacgcagactggaaggagtacctgaacctgctcatctgcgaggagagccacctcaagtacatggaggactaccaccagtttcacgaagacgtgaaggacgctcaggagctgctgcgcaaggtggactcggacctgaaccagaagtatggccctgacttcaaggaccggtaccagattgagctgctgctgcgggagctggatgaccaggagaaggtgctggacaagtatgaggacgtggtgcaggggctgcagaagcgaggccagcaggtggtgcccctcaagtaccgccgggagactccgctcaagcccatccccgtggaggcactctgtgactttgagggggagcagggcctgatctcgcggggctacagctacaccctgcagaagaacaacggggagagctgggagctcatggacagcgctgggaacaagctgattgctccggccgtctgttttgtgatcccccccacagaccctgaggccctggctctggctgacagcctgggcagccagtaccggagcgtgcggcagaaggcagctgggagcaaacgcacgctgcagcagcggtatgaggtgctgaagaccgagaatcccggagatgcctctgacctacaggggcggcagctgctggctggcttggacaaggtggccagcgacctggaccggcaggagaaggccatcacagggatcctgcggccaccactggagcaaggccgggctgtgcaggacagtgccgagcgggccaaggacctcaagaacatcaccaacgagctactgcggattgaacctgagaagacgcggagcacggctgagggcgaagccttcatccaggccctcccaggcagtggcaccacacccctgctgaggacccgggtggaggacaccaaccggaaatacgagcacctcctgcagctgctggacttggcccaggagaaggttgatgtggccaaccgcctggagaagagcctgcagcagagctgggagttgctggccacacacgagaaccatctgaatcaggatgacacagtgcctgagagcagccgtgtcctggacagcaaggggcaggagctggcgcccatggcctgtgagttacaggcccagaagtccctcctgggtgaggtggagcagaacttgcaggcggccaagcagtgctcgagcacactggccagccgcttccaggagcactgcccggacctggagcgccaggaggccgaggtgcacaagctgggccagcgtttcaacaacctgcgccagcaggtggaacgcagggcgcagagcctacagagcgccaaggcagcctacgagcacttccaccgcggccatgaccacgtgctgcagttcctagtcagcatccccagttacgagccccaggagacagacagcctcagccagatggagaccaagctgaagaaccagaagaacctgctagatgagatagcaagtagggagcaggaagtacagaagatctgtgccaattcccagcagtaccagcaagctgtaaaggactatgagttagaagcagaaaaactaaggtctcttctcgacttggagaatggaaggagcagccacgtgagcaagagagccaggctccaatctcctgccaccaaagtgaaggaagaggaagcagcacttgccgccaagttcactgaagtttatgccatcaacagacagaggctgcagaatctggagtttgctctgaatctcctcagacagcagccggaagtagaagtgacccatgagaccctgcaaaggaataggccggactctggagtggaggaggcgtggaagatcaggaaggaactggatgaggagactgagcggaggcggcagctggagaacgaggtcaagagcacccaggaagaaatctggaccttgaggaatcaggggcctcaggaatcggtggtgaggaaggaggtgctcaagaaggtgccggatcccgtgctggaggagagcttccagcagctgcagcggacgctggcagaggagcagcacaagaaccagctgctgcaggaggagctggaggcactgcagctgcagctgcgtgccctggagcaggagaccagagacggggggcaggagtacgtggtcaaggaggtcctgcgcatcgagcctgacagggcccaggcggatgaggtcttgcagctgcgggaggagctggaggcactgaggcggcagaagggcgcccgggaggcagaggtgctcctcctgcagcagcgtgtggccgccctggctgaagagaagagccgggcgcaggagaaggtcacagagaaagaggtggtgaaactgcagaatgacccccagctggaggcagagtaccagcagctgcaggaggaccaccagcgccaggaccagctcagggagaagcaggaggaggagctgagcttcctccaggacaagctcaagaggctagagaaggagcgggccatggccgagggcaagatcaccgtcaaggaggtgctcaaggtggagaaggacgcggccaccgagagggaggtcagcgatctcacccgccaatatgaggacgaggctgccaaggctcgcgctagccagagggagaagacggagctgctccgaaagatatgggccttggaggaggagaacgccaaagtggtggtacaggagaaggtgcgggagatcgtgcggccagaccccaaggcggaaagtgaagtggcgaacctccgcctggagcttgtggagcaggagcgaaagtaccggggtgccgaggagcagctccggagctaccagagtgagctggaggccctcaggaggcgaggcccccaggtggaagtcaaagaggtgactaaggaagtcattaagtacaagactgaccctgagatggagaaggagcttcagcggctcagggaggagatcgtggacaagaccagactgatcgaaaggtgtgatttagagatctaccagctgaaaaaggaaatccaggccctgaaagacaccaaaccccaggtccagaccaaagaggtggtccaggagatcctccaattccaagaagaccctcaaaccaaggaggaggtggcgtctctgagggcaaagctctcagaggagcagaagaaacaagtggatctggagagggaaagagcttcccaggaagagcagatcgcccggaaagaggaggagctctcgcgggtgaaggaaagggtggtgcagcaggaggtggtcaggtatgaggaggagccaggcctgcgggccgaggcgagcgcctttgccgagagcatcgatgtggagctgcggcagattgacaagctgcgggcagagctgcggcggctgcagcgccggcgcaccgagcttgagcggcagctggaggagctagagcgcgagcggcaggcccgcagggaggccgagcgcgaggtacagcggttgcagcagcggctggcagcgctggagcaggaagaagctgaggcccgtgagaaggtaacccatacgcagaaggtggtgctgcagcaggacccgcagcaggcgcgagagcatgccctgctccgactccagctggaagaagagcagcaccggcggcagctcctggagggggagctcgagaccctccggaggaaactggctgcactggagaaggcggaggtcaaggagaaggtggtgctctccgagagtgtccaggtggagaagggcgacaccgagcaagagatccagaggctcaagagcagcctggaggaggagagccgcagcaagcgcgagctggacgtcgaggtgagccggctggaagccaggctttcggagctggaattccataactccaagtcatccaaggaactagactttctgagggaagagaaccacaaattacagctggagaggcaaaacctgcagctggagacccgaaggctccaatcggaaatcaacatggcagcgacggaaacacgagacctgcggaacatgaccgtggcggactctgggaccaaccatgactccagactgtggtccctggagagggaactggatgacctcaagaggctctccaaggacaaagacctcgagatcgacgagctgcagaagcgcctgggctccgtggccgtcaagcgggagcagcgggagaaccacctgcggcgctccatcgtagtcatccaccctgacacaggccgcgagctgtccccggaggaagcccaccgtgccgggctcattgactggaacatgttcgtgaaactcagaagccaggagtgcgactgggaggagatctcagtgaagggtcccaatggggagtcctcagtgatacacgacaggaagtctggcaagaagttctccatcgaagaggccctgcagagtggcaggctgacccctgctcagtatgaccgctatgtcaacaaggatatgtccatccaggagctggcggtcttggtatctgggcagaagtaggcacagctcttgcaactcttcgtaacggcagacgctggccctctcctacgacgcagtgacctccttggtgtcgtcctctccctagccctggtgcaggccaagcattttatacataccctcgctgccaggctgctcagagtcccgcccacatatgagacaggcactggctgaagacaggcaactctcgtcccaaccatcattcaccctgagtgacgtacttcatcctccaatgactggacaactgcgatgccttttcctcccttttcctgtacactcccagcaacaaactcctcatgataactgcacacaatctgaaaaccactgaaggacaagccaaccacagcagccaagcccactccttgcagcatgggtactggtggcacaccagacagtgacactgccccacaaaggcctgggcccgtgggggctgctgcctggcatgacatctctccagatttctggcttaaaaccaactttccatccgagaagcctcctcagtagttactctgctcatgagacagatctgggctccaagccaggaaaggtgaacagaaaccacaagtgtccagccctcggtgctggagtggacgttaattgtcagccaccagactgtcccggcacctacagagaatgtttcacagttctggcatttaaatcctttgatagtggattgtgctgctgttagccttagtttcagtgctttacaagtctcgcttattatctcattggtatttaggtatacaaaacagttgattattcaccacgccaatatctgggtctctgtatctcatgtagaacataagaaaatgggaactaatagggaactttatttatagcatgaaaataaacctggtggctggagtctgcttgtt

SEQ ID NO: 60 - DNA, 1081 bp, human
attgcaacttggtctcacagtggcttaggccagggtgggagcagtgaacggagtcacaaaagaaatttttcagctgtcctctctgacaccaccccggcctgcctctttgttgccatgagagctgcctacctcttcctgctattcctgcctgcaggcttgctggctcagggccagtatgatctggacccgctgccgccgttccctgaccacgtccagtacacccactatagcgaccagatcgacaacccagactactatgattatcaagaggtgactcctcggccctccgaggaacagttccagttccagtcccagcagcaagtccaacaggaagtcatcccagccccaaccccagaaccaggaaatgcagagctggagcccacagagcctgggcctcttgactgccgtgaggaacagtacccgtgcacccgcctctactccatacacaggccttgcaaacagtgtctcaacgaggtctgcttctacagcctccgccgtgtgtacgtcattaacaaggagatctgtgttcgtacagtgtgtgcccacgaggagctcctccgagctgacctctgtcgggacaagttctccaaatgtggcgtgatggccagcagcggcctgtgccaatccgtggcggcctcctgtgccaggagctgtgggagctgctagggtggtgctggcatcctgagtcctggccctcctgggatctggggccctcgggctacctgacctggtgcttttttccccatccccatgttccttttattctgaaaaagttagtggactgcagccctgggggttgcaggctgcggtgcctcaggcccctccttcagcctgtggccacctctggggcacgatgggggctccccactgcccagtctgcccctcgggttgggggagtatcccaggcctctctgtgggacctgggcctgacgggcccttctcagcccgttttgaggacagacagtcccccgaggtaggctacatccccccaccccagctggtctgcttggatttcctacagcccccgtgggcatggaccacctttattttatacaaaattaaaaacaagtttttacaaaaa

SEQ ID NO: 61 - DNA, 522 bp, human
tgccatttatttaaaacttttattaacgcttgaagaaaaataatgcaatgtgacaatgtacaggtcctgttgcctaaatccgtagtagaaacagatattatcacttagcaagctcacgtggtgccaattctgagatcagacggggttgttcctccttaggaagtggccactggaagcattgtttttccatgctatttccgtgaagccttttgcttggttcgagtttaaatttctccctttgtgtgagtatgactatagttctggcctggtgttttctatttatttagttttagatgtcagcattttactatacttggtcctctcacttcagaataacagggctatttattgatacaaaggagaggtgttcagatcatcttgttaagatgcagagctcaaaataaacactaaatctttatttggagatccacatccttcctcaaaggaaggctcatgagtaaatttgtatgcagtataaagcccaagtagagggtgtatttttaatgactactttgcttacat

SEQ ID NO: 62 - DNA, 3151 bp, human
ccggccagcgggcgggctccccagccaggccgctgcacctgtcaggggaacaagctggaggagcaggaccctagacctctgcagcccataccaggtctcatggaggggaacaagctggaggagcaggactctagccctccacagtccactccagggctcatgaaggggaacaagcgtgaggagcaggggctgggccccgaacctgcggcgccccagcagcccacggcggaggaggaggccctgatcgagttccaccgctcctaccgagagctcttcgagttcttctgcaacaacaccaccatccacggcgccatccgcctggtgtgctcccagcacaaccgcatgaagacggccttctgggcagtgctgtggctctgcacctttggcatgatgtactggcaattcggcctgcttttcggagagtacttcagctaccccgtcagcctcaacatcaacctcaactcggacaagctcgtcttccccgcagtgaccatctgcaccctcaatccctacaggtacccggaaattaaagaggagctggaggagctggaccgcatcacagagcagacgctctttgacctgtacaaatacagctccttcaccactctcgtggccggctcccgcagccgtcgcgacctgcgggggactctgccgcaccccttgcagcgcctgagggtcccgcccccgcctcacggggcccgtcgagcccgtagcgtggcctccagcttgcgggacaacaacccccaggtggactggaaggactggaagatcggcttccagctgtgcaaccagaacaaatcggactgcttctaccagacatactcatcaggggtggatgcggtgagggagtggtaccgcttccactacatcaacatcctgtcgaggctgccagagactctgccatccctggaggaggacacgctgggcaacttcatcttcgcctgccgcttcaaccaggtctcctgcaaccaggcgaattactctcacttccaccacccgatgtatggaaactgctatactttcaatgacaagaacaactccaacctctggatgtcttccatgcctggaatcaacaacggtctgtccctgatgctgcgcgcagagcagaatgacttcattcccctgctgtccacagtgactggggcccgggtaatggtgcacgggcaggatgaacctgcctttatggatgatggtggctttaacttgcggcctggcgtggagacctccatcagcatgaggaaggaaaccctggacagacttgggggcgattatggcgactgcaccaagaatggcagtgatgttcctgttgagaacctttacccttcaaagtacacacagcaggtgtgtattcactcctgcttccaggagagcatgatcaaggagtgtggctgtgcctacatcttctatccgcggccccagaacgtggagtactgtgactacagaaagcacagttcctgggggtactgctactataagctccaggttgacttctcctcagaccacctgggctgtttcaccaagtgccggaagccatgcagcgtgaccagctaccagctctctgctggttactcacgatggccctcggtgacatcccaggaatgggtcttccagatgctatcgcgacagaacaattacaccgtcaacaacaagagaaatggagtggccaaagtcaacatcttcttcaaggagctgaactacaaaaccaattctgagtctccctctgtcacgatggtcaccctcctgtccaacctgggcagccagtggagcctgtggttcggctcctcggtgttgtctgtggtggagatggctgagctcgtctttgacctgctggtcatcatgttcctcatgctgctccgaaggttccgaagccgatactggtctccaggccgagggggcaggggtgctcaggaggtagcctccaccctggcatcctcccctccttcccacttctgcccccaccccatgtctctgtccttgtcccagccaggccctgctccctctccagccttgacagcccctccccctgcctatgccaccctgggcccccgcccatctccagggggctctgcaggggccagttcctccacctgtcctctgggggggccctgagagggaaggagaggtttctcacaccaaggcagatgctcctctggtgggagggtgctggccctggcaagattgaaggatgtgcagggcttcctctcagagccgcccaaactgccgttgatgtgtggaggggaagcaagatgggtaagggctcaggaagttgctccaagaacagtagctgatgaagctgcccagaagtgccttggctccagccctgtaccccttggtactgcctctgaacactctggtttccccacccaactgcggctaagtctctttttcccttggatcagccaagcgaaacttggagctttgacaaggaactttcctaagaaaccgctgataaccaggacaaaacacaaccaagggtacacgcaggcatgcacgggtttcctgcccagcgacggcttaagccagcccccgactggcctggccacactgctctccagtagcacagatgtctgctcctcctcttgaacttgggtgggaaaccccacccaaaagccccctttgttacttaggcaattccccttccctgactcccgagggctagggctagagcagacccgggtaagtaaaggcagacccagggctcctctagcctcatacccgtgccctcacagagccatgccccggcacctctgccctgtgtctttcatacctctacatgtctgcttgagatatttcctcagcctgaaagtttccccaaccatctgccagagaactcctatgcatcccttagaaccctgctcagacaccattacttttgtgaacgcttctgccacatcttgtcttccccaaaattgatcactccgccttctcctgggctcccgtagcacactataacatctgctggagtgttgctgttgcaccatactttcttgtacatttgtgtctcccttcccaactagactgtaagtgccttgcggtcagggactgaatcttgcccgtttatgtatgctccatgtctagcccatcatcctgcttggagcaagtaggcaggagctcaataaatgtttgttgcatgaaaaaaaaaaaaaaaaaa

SEQ ID NO: 63 - DNA, 3921 bp, human
cggaagttgcgcgcaggccggcgggcgggagcggacaccgaggccggcgtgcaggcgtgcgggtgtgcgggagccgggctcggggggatcggaccgagagcgagaagcgcggcatggagctccaggcagcccgcgcctgcttcgccctgctgtggggctgtgcgctggccgcggccgcggcggcgcagggcaaggaagtggtactgctggactttgctgcagctggaggggagctcggctggctcacacacccgtatggcaaagggtgggacctgatgcagaacatcatgaatgacatgccgatctacatgtactccgtgtgcaacgtgatgtctggcgaccaggacaactggctccgcaccaactgggtgtaccgaggagaggctgagcgtaacaactttgagctcaactttactgtacgtgactgcaacagcttccctggtggcgccagctcctgcaaggagactttcaacctctactatgccgagtcggacctggactacggcaccaacttccagaagcgcctgttcaccaagattgacaccattgcgcccgatgagatcaccgtcagcagcgacttcgaggcacgccacgtgaagctgaacgtggaggagcgctccgtggggccgctcacccgcaaaggcttctacctggccttccaggatatcggtgcctgtgtggcgctgctctccgtccgtgtctactacaagaagtgccccgagctgctgcagggcctggcccacttccctgagaccatcgccggctctgatgcaccttccctggccactgtggccggcacctgtgtggaccatgccgtggtgccaccggggggtgaagagccccgtatgcactgtgcagtggatggcgagtggctggtgcccattgggcagtgcctgtgccaggcaggctacgagaaggtggaggatgcctgccaggcctgctcgcctggattttttaagtttgaggcatctgagagcccctgcttggagtgccctgagcacacgctgccatcccctgagggtgccacctcctgcgagtgtgaggaaggcttcttccgggcacctcaggacccagcgtcgatgccttgcacacgacccccttccgccccacactacctcacagccgtgggcatgggtgccaaggtggagctgcgctggacgccccctcaggacagcgggggccgcgaggacattgtctacagcgtcacctgcgaacagtgctggcccgagtctggggaatgcgggccgtgtgaggccagtgtgcgctactcggagcctcctcacggactgacccgcaccagtgtgacagtgagcgacctggagccccacatgaactacaccttcaccgtggaggcccgcaatggcgtctcaggcctggtaaccagccgcagcttccgtactgccagtgtcagcatcaaccagacagagccccccaaggtgaggctggagggccgcagcaccacctcgcttagcgtctcctggagcatccccccgccgcagcagagccgagtgtggaagtacgaggtcacttaccgcaagaagggagactccaacagctacaatgtgcgccgcaccgagggtttctccgtgaccctggacgacctggccccagacaccacctacctggtccaggtgcaggcactgacgcaggagggccagggggccggcagcaaggtgcacgaattccagacgctgtccccggagggatctggcaacttggcggtgattggcggcgtggctgtcggtgtggtcctgcttctggtgctggcaggagttggcttctttatccaccgcaggaggaagaaccagcgtgcccgccagtccccggaggacgtttacttctccaagtcagaacaactgaagcccctgaagacatacgtggacccccacacatatgaggaccccaaccaggctgtgttgaagttcactaccgagatccatccatcctgtgtcactcggcagaaggtgatcggagcaggagagtttggggaggtgtacaagggcatgctgaagacatcctcggggaagaaggaggtgccggtggccatcaagacgctgaaagccggctacacagagaagcagcgagtggacttcctcggcgaggccggcatcatgggccagttcagccaccacaacatcatccgcctagagggcgtcatctccaaatacaagcccatgatgatcatcactgagtacatggagaatggggccctggacaagttccttcgggagaaggatggcgagttcagcgtgctgcagctggtgggcatgctgcggggcatcgcagctggcatgaagtacctggccaacatgaactatgtgcaccgtgacctggctgcccgcaacatcctcgtcaacagcaacctggtctgcaaggtgtctgactttggcctgtcccgcgtgctggaggacgaccccgaggccacctacaccaccagtggcggcaagatccccatccgctggaccgccccggaggccatttcctaccggaagttcacctctgccagcgacgtgtggagctttggcattgtcatgtgggaggtgatgacctatggcgagcggccctactgggagttgtccaaccacgaggtgatgaaagccatcaatgatggcttccggctccccacacccatggactgcccctccgccatctaccagctcatgatgcagtgctggcagcaggagcgtgcccgccgccccaagttcgctgacatcgtcagcatcctggacaagctcattcgtgcccctgactccctcaagaccctggctgactttgacccccgcgtgtctatccggctccccagcacgagcggctcggagggggtgcccttccgcacggtgtccgagtggctggagtccatcaagatgcagcagtatacggagcacttcatggcggccggctacactgccatcgagaaggtggtgcagatgaccaacgacgacatcaagaggattggggtgcggctgcccggccaccagaagcgcatcgcctacagcctgctgggactcaaggaccaggtgaacactgtggggatccccatctgagcctcgacagggcctggagccccatcggccaagaatacttgaagaaacagagtggcctccctgctgtgccatgctgggccactggggactttatttatttctagttctttcctccccctgcaacttccgctgaggggtctcggatgacaccctggcctgaactgaggagatgaccagggatgctgggctgggccctctttccctgcgagacgcacacagctgagcacttagcaggcaccgccacgtcccagcatccctggagcaggagccccgccacagccttcggacagacatataggatattcccaagccgaccttccctccgccttctcccacatgaggccatctcaggagatggagggcttggcccagcgccaagtaaacagggtacctcaagccccatttcctcacactaagagggcagactgtgaacttgactgggtgagacccaaagcggtccctgtccctctagtgccttctttagaccctcgggccccatcctcatccctgactggccaaacccttgctttcctgggcctttgcaagatgcttggttgtgttgaggtttttaaatatatattttgtactttgtggagagaatgtgtgtgtgtggcagggggccccgccagggctggggacagagggtgtcaaacattcgtgagctggggactcagggaccggtgctgcaggagtgtcctgcccatgccccagtcggccccatctctcatccttttggataagtttctattctgtcagtgttaaagattttgttttgttggacatttttttcgaatcttaatttattattttttttatatttattgttagaaaatgacttatttctgctctggaataaagttgcagatgattcaaaccg

SEQ ID NO: 64 - DNA, 753 bp, human
tagtggccaaatagcacatcctccaacgttaaaagacagtggatcatgaaaagtgctgtttgtcctttgagaaagaaataatgtttgagcgcagagtaaaataaggctccttcatgtggcgtatgggccatagcctataatggttagaacctcctattttaatggaattctggatctttcggactgaggccttctcaaactttactctaagtctccaagaatacagaaaatgcttttccgcggcacgaatcagactcatctacacagcagtatgaatgatgttttagaatgattccctcttgctattggaatgtggtccagacgtcaaccaggaacatgtcacttggagagggacgaagaaagggtctgataaacacagaggttttaaacagtccctaccattggcctgcatcatgacaaagttacaaattcaagggagatataaaatctagatcaattaattcttaataggctttatcgtttatgcttaatccctctctcccccttctttttgtctcaagattatattataataatgttctctgggtaggtgttgaaaaatgagcctgtaatcctcaagctgacacgtaatttgaactggtgcagaacaaacaaaaaaggattacgggaatttatttattaggattctcccaaatgattttcatccaatttaaaatcattccaatatctggcaggtaccttcaggtttagggcttacttgggcagcctcagtggacatccagggggctcctg

SEQ ID NO: 65 - DNA, 2328 bp, human
gccagccgagcggccagccagtgcggggctggccatgtaaggcccacaggcggtcctgcccgcccggtgccctgcggagagcctcgtgcagccctgggcaccgcccctgccctgccctgaccccttggccttgaaatgctgtcatcggaggagccgtcccgctcgggacaaggccagcatggacaaagctagagctggggcaagcaaggagccttcctgtcctcgaggccgtgggaagagaagcacgcccagggggccactcctgagagcctctctgtccaccaggcctctgcagaggggtcaccatggctctggcccgaggcagccggcagctgggggccctggtgtggggcgcctgcctgtgcgtgctggtgcacgggcagcaggcgcagcccgggcagggctcggaccccgcccgctggcggcagctgatccagtgggagaacaacgggcaggtgtacagcttgctcaactcgggctcagagtacgtgccggccggacctcagcgctccgagagtagctcccgggtgctgctggccggcgcgccccaggcccagcagcggcgcagccacgggagcccccggcgtcggcaggcgccgtccctgcccctgccggggcgcgtgggctcggacaccgtgcgcggccaggcgcggcacccattcggctttggccaggtgcccgacaactggcgcgaggtggccgtcggggacagcacgggcatggccctggcccgcacctccgtctcccagcaacggcacgggggctccgcctcctcggtctcggcttcggccttcgccagcacctaccgccagcagccctcctacccgcagcagttcccctacccgcaggcgcccttcgtcagccagtacgagaactacgaccccgcgtcgcggacctacgaccagggtttcgtgtactaccggcccgcgggcggcggcgtgggcgcgggggcggcggccgtggcctcggcgggggtcatctacccctaccagccccgggcgcgctacgaggagtacggcggcggcgaagagctgcccgagtacccgcctcagggcttctacccggcccccgagaggccctacgtgccgccgccgccgccgccccccgacggcctggaccgccgctactcgcacagtctgtacagcgagggcacccccggcttcgagcaggcctaccctgaccccggtcccgaggcggcgcaggcccatggcggagacccacgcctgggctggtacccgccctacgccaacccgccgcccgaggcgtacgggccgccgcgcgcgctggagccgccctacctgccggtgcgcagctccgacacgcccccgccgggtggggagcggaacggcgcgcagcagggccgcctcagcgtaggcagcgtgtaccggcccaaccagaacggccgcggtctccctgacttggtcccagaccccaactatgtgcaagcatccacttatgtgcagagagcccacctgtactccctgcgctgtgctgcggaggagaagtgtctggccagcacagcctatgcccctgaggccaccgactacgatgtgcgggtgctactgcgcttcccccagcgcgtgaagaaccagggcacagcagacttcctccccaaccggccacggcacacctgggagtggcacagctgccaccagcattaccacagcatggacgagttcagccactacgacctactggatgcagccacaggcaagaaggtggccgagggccacaaggccagtttctgcctggaggacagcacctgtgacttcggcaacctcaagcgctatgcatgcacctctcatacccagggcctgagcccaggctgctatgacacctacaatgcggacatcgactgccagtggatcgacataaccgacgtgcagcctgggaactacatcctcaaggtgcacgtgaacccaaagtatattgttttggagtctgacttcaccaacaacgtggtgagatgcaacattcactacacaggtcgctacgtttctgcaacaaactgcaaaattgtccaatcctgatctccgggagggacagatggccaatctctccccttccaaagcaggccctgctccccgggcagcctcccgccgaggggcccagcccccaacccacaggcagggaggggcatccctccctgccggcctcagggagcgaacgtggatgaaaaccacagggattccggatgccagaccccattttatacttcacttttctctacagtgttgttttgttgttgttggtttttattttttatactttggccataccacagagctagattgcccaggtctgggctgaataaaacaaggtttttct

SEQ ID NO: 66 - DNA, 2870 bp, human
aggtcgcaggcgggcgtgcgtggagcgggggccgcggccgcgccgcagagatgtgactcgggccgaaggccagctggagcgtcggcgctgcggggccgcgggggtcgaatgttcgtggcatcagagagaaagatgagagctcaccaggtgctcaccttcctcctgctcttcgtgatcacctcggtggcctctgaaaacgccagcacatcccgaggctgtgggctggacctcctccctcagtacgtgtccctgtgcgacctggacgccatctggggcattgtggtggaggcggtggccggggcgggcgccctgatcacactgctcctgatgctcatcctcctggtgcggctgcccttcatcaaggagaaggagaagaagagccctgtgggcctccactttctgttcctcctggggaccctgggcctctttgggctgacgtttgccttcatcatccaggaggacgagaccatctgctctgtccgccgcttcctctggggcgtcctctttgcgctctgcttctcctgcctgctgagccaggcatggcgcgtgcggaggctggtgcggcatggcacgggccccgcgggctggcagctggtgggcctggcgctgtgcctgatgctggtgcaagtcatcatcgctgtggagtggctggtgctcaccgtgctgcgtgacacaaggccagcctgcgcctacgagcccatggactttgtgatggccctcatctacgacatggtactgcttgtggtcaccctggggctggccctcttcactctgtgcggcaagttcaagaggtggaagctgaacggggccttcctcctcatcacagccttcctctctgtgctcatctgggtggcctggatgaccatgtacctcttcggcaatgtcaagctgcagcagggggatgcctggaacgaccccaccttggccatcacgctggcggccagcggctgggtcttcgtcatcttccacgccatccctgagatccactgcacccttctgccagccctgcaggagaacacgcccaactacttcgacacgtcgcagcccaggatgcgggagacggccttcgaggaggacgtgcagctgccgcgggcctatatggagaacaaggccttctccatggatgaacacaatgcagctctccgaacagcaggatttcccaacggcagcttgggaaaaagacccagtggcagcttggggaaaagacccagcgctccgtttagaagcaacgtgtatcagccaactgagatggccgtcgtgctcaacggtgggaccatcccaactgctccgccaagtcacacaggaagacacctttggtgaaagactttaagttccagagaatcagaatttctcttaccgatttgcctccctggctgtgtctttcttgagggagaaatcggtaacagttgccgaaccaggccgcctcacagccaggaaatttggaaatcctagccaaggggatttcgtgtaaatgtgaacactgacgaactgaaaagctaacaccgactgcccgcccctcccctgccacacacacagacacgtaataccagaccaacctcaatccccgcaaactaaagcaaagctaattgcaaatagtattaggctcactggaaaatgtggctgggaagactgtttcatcctctgggggtagaacagaaccaaattcacagctggtgggccagactggtgttggttggaggtggggggctcccactcttatcacctctccccagcaagtgctggaccccaggtagcctcttggagatgaccgttgcgttgaggacaaatggggactttgccaccggcttgcctggtggtttgcacatttcaggggggtcaggagagttaaggaggttgtgggtgggattccaaggtgaggcccaactgaatcgtggggtgagctttatagccagtagaggtggagggaccctggcatgtgccaaagaagaggccctctgggtgatgaagtgaccatcacatttggaaagtgatcaaccactgttccttctatggggctcttgctctaatgtctatggtgagaacacaggccccgccccttcccttgtagagccatagaaatattctggcttggggcagcagtcccttcttcccttgatcatctcgccctgttcctacacttacgggtgtatctccaaatcctctcccaattttattcccttattcatttcaagagctccaatggggtctccagctgaaagcccctccgggaggcaggttggaaggcaggcaccacggcaggttttccgcgatgatgtcacctagcagggcttcaggggttcccactaggatgcagagatgacctctcgctgcctcacaagcagtgacacctcgggtcctttccgttgctatggtgaaaattcctggatggaatggatcacatgagggtttcttgttgcttttggagggtgtgggggatattttgttttggtttttctgcaggttccatgaaaacagcccttttccaagcccattgtttctgtcatggtttccatctgtcctgagcaagtcattcctttgttatttagcatttcgaacatctcggccattcaaagcccccatgttctctgcactgtttggccagcataacctctagcatcgattcaaagcagagttttaacctgacggcatggaatgtataaatgagggtgggtccttctgcagatactctaatcactacattgctttttctataaaactacccataagcctttaacctttaaagaaaaatgaaaaaggttagtgtttgggggccgggggaggactgaccgcttcataagccagtacgtctgagctgagtatgtttcaataaaccttttgatatttctcaaaaaaaaaaaaaaaaaaaaaaa

SEQ ID NO: 67 - DNA, 8427 bp, human
atggccctggtcctggagatcttcaccctgctggcctccatctgctgggtgtcggccaatatcttcgagtaccaggtggatgcccagccccttcgtccctgtgagctgcagagggaaacggcctttctgaagcaagcagactacgtgccccagtgtgcagaggatggcagcttccagactgtccagtgccagaacgacggccgctcctgctggtgtgtgggtgccaacggcagtgaagtgctgggcagcaggcagccaggacggcctgtggcttgtctgtcattttgtcagctacagaaacagcagatcttactgagtggctacattaacagcacagacacctcctacctccctcagtgtcaggattcaggggactacgcgcctgttcagtgtgatgtgcagcaggtccagtgctggtgtgtggacgcagaggggatggaggtgtatgggacccgccagctggggaggccaaagcgatgtccaaggagctgtgaaataagaaatcgtcgtcttctccacggggtgggagataagtcaccaccccagtgttctgcggagggagagtttatgcctgtccagtgcaaatttgtcaacaccacagacatgatgatttttgatctggtccacagctacaacaggtttccagatgcatttgtgaccttcagttccttccagaggaggttccctgaggtatctgggtattgccactgtgctgacagccaagggcgggaactggctgagacaggtttggagttgttactggatgaaatttatgacaccatttttgctggcctggaccttccttccaccttcactgaaaccaccctgtaccggatactgcagagacggttcctcgcagttcaatcagtcatctctggcagattccgatgccccacaaaatgtgaagtggagcggtttacagcaaccagctttggtcacccctatgttccaagctgccgccgaaatggcgactatcaggcggtgcagtgccagacggaagggccctgctggtgtgtggacgcccaggggaaggaaatgcatggaacccggcagcaaggggagccgccatcttgtgctgaaggccaatcttgtgcctccgaaaggcagcaggccttgtccagactctactttgggacctcaggctacttcagccagcacgacctgttctcttccccagagaaaagatgggcctctccaagagtagccagatttgccacatcctgcccacccacgatcaaggagctctttgtggactctgggcttctccgcccaatggtggagggacagagccaacagttttctgtctcagaaaatcttctcaaagaagccatccgagcaatttttccctcccgagggctggctcgtcttgcccttcagtttaccaccaacccaaagagactccagcaaaacctttttggagggaaatttttggtgaatgttggccagtttaacttgtctggagcccttggcacaagaggcacatttaacttcagtcaatttttccagcaacttggtcttgcaagcttcttgaatggagggagacaagaagatttggccaagccactctctgtgggattagattcaaattcttccacaggaacccctgaagctgctaagaaggatggtactatgaataagccaactgtgggcagctttggctttgaaattaacctacaagagaaccaaaatgccctcaaattccttgcttctctcctggagcttccagaattccttctcttcttgcaacatgctatctctgtgccagaagatgtggcaagagatttaggtgatgtgatggaaacggtactcagctcccagacctgtgagcagacacctgaaaggctatttgtcccatcatgcacgacagaaggaagctatgaggatgtccaatgcttttccggagagtgctggtgtgtgaattcctggggcaaagagcttccaggctcaagagtcagaggtggacagccaaggtgccccacagactgtgaaaagcaaagggctcgcatgcaaagcctcatgggcagccagcctgctggctccaccttgtttgtccctgcttgtactagtgagggacatttcctgcctgtccagtgcttcaactcagagtgctactgtgttgatgctgagggtcaggccattcctggaactcgaagtgcaatagggaagcccaagaaatgccccacgccctgtcaattacagkctgagcaagctttcctcaggacggtgcaggccctgctctctaactccagcatgctacccaccctttccgacacctacatcccacagtgcagcaccgatgggcagtggagacaagtgcaatgcaatgggcctccygagcaggtcttcgagttgtaccaacgatgggaggctcagaacaagggccaggatctgacgcctgccaagctgctagtgaagatcatgagctacagagaagcagcttccggaaacttcagtctctttattcaaagtctgtatgaggctggccagcaagatgtcttcccggtgctgtcacaatacccttctctgcaagatgtcccactagcagcactggaagggaaacggccccagcccagggagaatatcctcctggagccctacctcttctggcagatcttaaatggccaactcagccaatacccggggtcctactcagacttcagcactcctttggcacattttgatcttcggaactgctggtgtgtggatgaggctggccaagaactggaaggaatgcggtctgagccaagcaagctcccaacatgtcctggctcctgtgaggaagcaaagctccgtgtactgcagttcattagggaaacggaagagattgtttcagcttccaacagttctcggttccctctgggggagagtttcctggtggccaagggaatccggctgaggaatgaggacctcggccttcctccgctcttcccgccccgggaggctttcgcggagcagtttctgcgtgggagtgattacgccattcgcctggcggctcagtctaccttaagcttctatcagagacgccgcttttccccggacgactcggctggagcatccgcccttctgcggtcgggcccctacrtgccacagtgtgatgcgtttggaagttgggagcctgtgcagtgccacgctgggactgggcactgctggtgtgtagatgagaaaggagggttcatccctggctcactgactgcccgctctctgcagattccacagtgcccgacaacctgcgagaaatctcgaaccagtgggctgctttccagttggaaacaggctagatcccaagaaaacccatctccaaaagacctgttcgtcccagcctgcctagaaacaggagagtatgccaggctgcaggcatcgggggctggcacctggtgtgtggaccctgcatcaggagaagagttgcggcctggctcgagcagcagtgcccagtgcccaagcctctgcaatgtgctcaagagtggagtcctctctaggagagtcagcccaggctatgtcccagcctgcagggcagaggatgggggcttttccccagtgcaatgtgaccaggcccagggcagctgctggtgtgtcatggacagcggagaagaggtgcctgggacgcgcgtgaccgggggccagcccgcctgtgagagcccgcggtgtccgctgccattcaacgcgtcggaggtggttggtggaacaatcctgtgtgagacaatctcgggccccacaggctctgccatgcagcagtgccaattgctgtgccgccaaggctcctggagcgtgtttccaccagggccattgatatgtagcctggagagcggacgctgggagtcacagctgcctcagccccgggcctgccaacggccccagctgtggcagaccatccagacccaagggcactttcagctccagctcccgccgggcaagatgtgcagtgctgactacgcgggtttgctgcagactttccaggttttcatattggatgagctgacagcccgcggcttctgccagatccaggtgaagacttttggcaccctggtttccattcctgtctgcaacaactcctctgtgcaggtgggttgtctgaccagggagcgtttaggagtgaatgttacatggaaatcacggcttgaggacatcccagtggcttctcttcctgacttacatgacattgagagagccttggtgggcaaggatctccttgggcgcttcacagatctgatccagagtggctcattccagcttcatctggactccaagacgttcccagcggaaaccatccgcttcctccaaggggaccactttggcacctctcccaggacatggtttgggtgctcggaaggattctaccaagtcttgacaagtgaggccagtcaggacggactgggatgcgttaagtgtcctgaaggaagctattcccaagatgaggaatgcattccttgtcctgttggattctaccaagaacaggcagggagcttggcctgtgtcccatgtcctgtgggcagaacgaccatttctgcyggagctttcagccagactcactgtgtcactgactgtcagaggaacgaagcaggcctgcaatgtgaccagaatggccagtatcgagccagccagaaggacaggggcagtgggaaggccttctgtgtggacggcgaggggcggaggctgccatggtgggaaacagaggcccctcttgaggactcacagtgtttgatgatgcagaagtttgagaaggttccagaatcaaaggtgatcttcgacgccaatgctcctgtggctgtcagatccaaagttcctgattctgagttccccgtgatgcagtgcttgacagattgcacagaggacgaggcctgcagcttcttcaccgtgtccacgacggagccagagatttcctgtgatttctatgcttggacaagtgacaatgttgcctgcatgacttctgaccagaaacgagatgcactggggaactcaaaggccaccagctttggaagtcttcgctgccaggtgaaagtgaggagccatggtcaagattctccagctgtgtatttgaaaaagggccaaggatccaccacaacacttcagaaacgctttgaacccactggtttccaaaacatgctttctggattgtacaaccccattgtgttctcagcctcaggagccaatctaaccgatgctcacctcttctgtcttcttgcatgcgaccgtgatctgtgttgcgatggcttcgtcctcacacaggttcaaggaggtgccatcatctgtgggttgctgagctcacccagtgtcctgctttgtaatgtcaaagactggatggatccctctgaagcctgggctaatgctacatgtcctggtgtgacatatgaccaggagagccaccaggtgatattgcgtcttggagaccaggagttcatcaagagtctgacacccttagaaggaactcaagacacctttaccaattttcagcaggtttatctctggaaagattctgacatggggtctcggcctgagtctatgggatgtagaaaaracacagtgccaaggccagcatctccaacagaagcaggtttgacaacagaacttttctcccctgtggacctcaaccaggtcattgtcaatggaaatcaatcactatccagccagaagcactggcttttcaagcacctgttttcagcccagcaggcaaacctatggtgcctttctcgttgtgtgcaggagcactctttctgtcagctcgcagagataacagagagtgcatccttgtacttcacctgcaccctctacccagaggcacaggtgtgtgatgacatcatggagtccaatgcccagggctgcagactgatcctgcctcagatgccaaaggccctgttccggaagaaagttatactggaagataaagtgaagaacttttacactcgcctgccgttccaaaaactgatggggatatccattagaaataaagtgcccatgtctgaaaaatctatttctaatgggttctttgaatgtgaacgacggtgcgatgcggacccatgctgcactggctttggatttctaaatgtttcccagttaaaaggaggagaggtgacatgtctcactctgaacagcttgggaattcagatgtgcagtgaggagaatggaggagcctggcgcattttggactgtggctctcctgacattgaagtccacacctatcccttcggatggtaccagaagcccattgctcaaaataatgctcccagtttttgccctttggttgttctgccttccctcacagagaaagtgtctctggactcgtggcagtccctggccctctcttcagtggttgttgatccatccattaggcactttgatgttgcccatgtcagcactgctgccaccagcaatttctctgctgtccgagacctctgtttgtcggaatgttcccaacatgaggcctgtctcatcaccactctgcaaacccaacctggggctgtgagatgtatgttctatgctgatactcaaagctgcacacatagtctgcagggtcagaactgccgacttctgcttcgtgaagaggccacccacatctaccggaagccaggaatctctctgctcagctatgaggcatctgtaccttctgtgcccatttccacccatggccggctgctgggcaggtcccaggccatccaggtgggtacctcatggaagcaagtggaccagttccttggagttccatatgctgccccgcccctggcagagaggcgcttccaggcaccagagcccttgaactggacaggctcctgggatgccagcaagccaagggccagctgctggcagccaggcaccagaacatccacgtctcctggagtcagtgaagattgtttgtatctcaatgtgttcatccctcagaatgtggcccctaacgcgtctgtgctggtgttcttccacaacaccatggacagggaggagagtgaaggatggccggctatcgacggctccttcttggctgctgttggcaacctcatcgtggtcactgccagctaccgagtgggtgtcttcggcttcctgagttctgggtccggagaggtgagtggcaactgggggctgctggaccaggtggcggctctgacctgggtgcagacccacatccgaggatttggcggggaccctcggcgcgtgtccctggcagcagaccgtggcggggctgatgtggccagcatccaccttctcacggccagggccaccaactcccaacttttccggagagctgtgctgatgggaggctccgcactctccccggccgccgtcatcagccatgagagggctcagcagcaggcaattgctttggcaaaggaggtcagttgccccatgtcatccagccaagaagtggtgtcctgcctccgccagaagcctgccaatgtcctcaatgatgcccagaccaagctcytggccgtgagtggccctttccactactggggtcctgtgatcgatggccacttcctccgtgagcctccagccagagcactgaagaggtctttaygggtagaggtcgatctgctcattgggagttctcaggacgacgggctcatcaacagagcaaaggctgtgaagcaatttgaggaaagtcaaggccggaccagtagcaaaacagccttttaccaggcactgcagaattctctgggtggcgaggactcagatgcccgcgtcgaggctgctgctacatggtattactctctggagcactccacggatgactatgcctccttctcccgggctctggagaatgccacccgggactactttatcatctgccctataatcgacatggccagtgcctgggcaaagagggcccgaggaaacgtcttcatgtaccatgctcctgaaaactacggccatggcagcctggagctgctggcggatgttcagtttgccttggggcttcccttctacccagcctacgaggggcagttttctctggaggagaagagcctgtcgctgaaaatcatgcagtacttttcccacttcatcagatcaggaaatcccaactacccttatgagttctcacggaaagtacccacatttgcaaccccctggcctgactttgtaccccgtgctggtggagagaactacaaggagttcagtgagctgctccccaatcgacagggcctgaagaaagccgactgctccttctggtccaagtacatctcgtctctgaagacatctgcagatggagccaagggcgggcagtcagcagagagtgaagaggaggagttgacggctggatctgggctaagagaagatctcctaagcctccaggaaccaggctctaagacctacagcaagtgaccagcccttgagctccccaaaaacctcacccgaggctgcccactatggtcatctttttctctaaaatagccacttaccttcaataaagtatctacatgcggtgaagcattgttgactcta

SEQ ID NO: 68 - DNA, 1885 bp, human
  misc_feature (12)..(12): n is a, c, g, or t
  misc_feature (24)..(24): n is a, c, g, or t
ttttttcccctnctcccccaaccnccaaccttcccccttacctcccccaccccctttatcaccaccccccttttaaataagagggtgaaggggaaccagagcgcacaagggaactgactcaggaggcagagaagatgggcatcctcagcgtagacttgctgatcacactgcaaattctgccagtttttttctccaactgcctcttcctggctctctatgactcggtcattctgctcaagcacgtggtgctgctgttgagccgctccaagtccactcgcggagagtggcggcgcatgctgacctcagagggactgcgctgcgtctggaagagcttcctcctcgatgcctacaaacaggtgaaattgggtgaggatgcccccaattccagtgtggtgcatgtctccagtacagaaggaggtgacaacagtggcaatggtacccaggagaagatagctgagggagccacatgccaccttcttgactttgccagccctgagcgcccactagtggtcaactttggctcagccacttgacctcctttcacgagccagctgccagccttccgcaaactggtggaagagttctcctcagtggctgacttcctgctggtctacattgatgaggctcatccatcagatggctgggcgataccgggggactcctctttgtcttttgaggtgaagaagcaccagaaccaggaagatcgatgtgcagcagcccagcagcttctggagcgtttctccttgccgccccagtgccgagttgtggctgaccgcatggacaataacgccaacatagcttacggggtagcctttgaacgtgtgtgcattgtgcagagacagaaaattgcttatctgggaggaaagggccccttctcctacaaccttcaagaagtccggcattggctggagaagaatttcagcaagagatgaaagaaaactagattagctggttaaaggtatgattataagagagcttattgttttaaaaagttatataaaggcaaggaaattaagaactgaatccatatttcaacagagccctattggcttactgaaagacaggagtttatctatcggaagaacatgaatctctaacagctccatacttctttcactactcaaatggcattgggctgagtaagtaaccatatcacctctcttcttagtaaaaagccctatgtgaaaagatcccaagatggagaggaagaaacgctaattcagcatgtgttcattctgcattgagaaggaactgatacatctgatgcatgctttgagaccagaagaaaagacttacctgaataattactacattagggaagctactgtctacgttaagataaagggtattgccttggctctatttggcatggatggagcccagttggaaaattcccaaatattacaacaagtccttgaacccaggccatgtggttagacgttggtgttaaggttagaccttatgttagagtcatttctgatgttccagcttctagccatgtagtgctctcagtcttcataccccagaaattattggtatatttgtagataccgagaatgatccctcagtctgagaggttagaatgatcatctgtaatctgagggttaatttctaggcaggtggagagagtggtaaaaaagaaatgaaattgacaagctaggaaagaggaggcagaaagatttggaaaattcacagagtttcacccttaagctgtagagagtgggtcacatttgttagccacggaaacatagaaacatacacaaggccagaaaaagaagaaggagctcaactaaaagtggcatagagaatacacatataaaaacaatatatttgtcatatgctcctagagaggagaaaggggtgattgaaaaaaaaaaaaaaaaaa

SEQ ID NO: 69 - DNA, 6735 bp, human
gcctgcagagagaggcactttgcaccacagacagatagcaagaagggaaagacagagagtgagaaaaaagaggagtcagtcgctcctggggaagggagagagtgagactgggagaaagagaagcacagaaagtgtgtgtaaaacggagtaaagaaagaaaaaaaaaaaactacccttaaagcacatttaaaaaaaaaaaactctggcaattcaagaaagaaacaggctacgtttaaagagcatagagacaatgaaaggctaaagaaaattttaaaatctctgccacagtctcataggtgcttggaaatgaaagtagaactgcctgtctttaacggactctgacagaggtaactggattagggacgagtacgccagctttttttttttttttttttttttttttaacatcttaaatcctgaaaaaaaaaaaaaaaaaaaaaaaaaggcagcagctccgaattgaatgaattgatgggcacactccaactgctgggctggagagactggacttagtcttgccatttctgcttctttgaaagaggagacaacttgggcttccttttaatttagttttttttccccttctcccccaacccccaaccttcccccttacctcccccaccccctttatcaccaccccccttttaaataagagggtgaaggggaaccagagcgcacaagggaactgactcaggaggcagagaagatgggcatcctcagcgtagacttgctgatcacactgcaaattctgccagtttttttctccaactgcctcttcctggctctctatgactcggtcattctgctcaagcacgtggtgctgctgttgagccgctccaagtccactcgcggagagtggcggcgcatgctgacctcagagggactgcgctgcgtctggaagagcttcctcctcgatgcctacaaacaggtgaaattgggtgaggatgcccccaattccagtgtggtgcatgtctccagtacagaaggaggtgacaacagtggcaatggtacccaggagaagatagctgagggagccacatgccaccttcttgactttgccagccctgagcgcccactagtggtcaactttggctcagccacttgacctcctttcacgagccagctgccagccttccgcaaactggtggaagagttctcctcagtggctgacttcctgctggtctacattgatgaggctcatccatcagatggctgggcgataccgggggactcctctttgtcttttgaggtgaagaagcaccagaaccaggaagatcgatgtgcagcagcccagcagcttctggagcgtttctccttgccgccccagtgccgagttgtggctgaccgcatggacaataacgccaacatagcttacggggtagcctttgaacgtgtgtgcattgtgcagagacagaaaattgcttatctgggaggaaagggccccttctcctacaaccttcaagaagtccggcattggctggagaagaatttcagcaagagatgaaagaaaactagattagctggttaaaggtatgattataagagagcttattgttttaaaaagttatataaaggcaaggaaattaagaactgaatccatatttcaacagagccctattggcttactgaaagacaggagtttatctatcggaagaacatgaatctctaacagctccatacttctttcactactcaaatggcattgggctgagtaagtaaccatatcacctctcttcttagtaaaaagccctatgtgaaaagatcccaagatggagaggaagaaacgctaattcagcatgtgttcattctgcattgagaaggaactgatacatctgatgcatgctttgagaccagaagaaaagacttacctgaataattactacattagggaagctactgtctacgttaagataaagggtattgccttggctctatttggcatggatggagcccagttggaaaattcccaaatattacaacaagtccttgaacccaggccatgtggttagacgttggtgttaaggttagaccttatgttagagtcatttctgatgttccagcttctagccatgtagtgctctcagtcttcataccccagaaattattggtatatttgtagataccgagaatgatccctcagtctgagaggttagaatgatcatctgtaatctgagggttaatttctaggcaggtggagagagtggtaaaaaagaaatgaaattgacaagctaggaaagaggaggcagaaagatttggaaaattcacagagtttcacccttaagctgtagagagtgggtcacatttgttagccacggaaacatagaaacatacacaaggccagaaaaagaagaaggagctcaactaaaagtggcatagagaatacacatataaaaacaatatatttgtcatatgctcctagagaggagaaaggggtgattgaaagaaaaaaaaatacttaaatatttgtaattgtgaggggtttcttttggaaataattacttttgaaccatgtatgtggtatgtatattttcagtgggttaattataccccatgatacctattaaaggaaaaccagtgggtctggtggtgctggtcttttcctccccattcctacaatttctatgtggcccaagtcattcctaatcttggtctctatagcagtgttctctctgaatgctgagctgaagaaattatacgtacatacacacatacatacatacatacaaatatatgtatatatattctcagctgctgcgggaggtaggtaccatggccattcagcacagccttgatttcctcccaaagtaggtgagctatagtgaagaataggtgcaaacaaacaagcttacttccattgcaaaatagaagaagaggaagttagagataattctgatcaatcattttggaggctttgttataaggcaacccccggtatatcatggaatttccattgacatttgaatttggacttggatcttcccttggtcccattagctgaggtttagtaatctaaagtccctatagtatatgattataatgctattttaaaaaatatatatataaaatatttttttctttttaaaatagacactatagttttacccataagtaatatttaaagattatagctcccaaaagaatggaccaaccactttcgtatcataatttctttttggtaaatatgagactattatgaaatcatagtatatgattgtatttaaaggtacaatcaaaggatcttttgtccattccattaataactgaataaaaaataaataaaatggatagaaaaaaactaaagttgaaaatacattcttaaactagttgtctgaaatgagaaaagagtgagaactaggtgtgcaagaaccaaacgtattttattttattttttaaatgggagcaacatatcagtcgtgtcaccagctggtatattgtgtaaatattaaagctccattgggactgatttttcatggcaacatcagctttctaatgttctaaattctataaaaaccacccacaaagaaacaaagcaaatttcattatctaatgagttgctggaaaatcatattgagaataattatttcagattcctcagttgttaacttctacattcaagggcttatctctgcccccattgatttttaacctcaaaatggtgtgagatttactgtggaaccctaaagcagtaaaataaaaaacctggttgcagcacattcacactgttgtccttaaaattccccttttttctctatgtacgataaagtaacagtatgtcagataagccggtggggggatgagattaggctgaggcagtgctagtcaactgggggaaaaggatgatggaaaaatcacccagttgtgctatatttttaaagaaggaggtcgtttatgtgtgcagacaattctccctgaggttagcccaatggagaaatgaagcagaggaaggaaacatagaaagacatgggctatcagggaggaagatgttcaatagaacatgcaagaatttctggaagaaaggctgtggaagggccaatggagaaaatgaatggacaaagctcaggaatccctacgctatgtagaatgttcttggtgttatcagggttaagccctgtaattatgtaacctatttatcgcaacatgaatttttatgatttcttgtgatgtattcttttatgaaattaacaagaactcattattttgaggtagaggaaaatcaatgctttatctgatatgctgagaaattattagattgccaatactcatgtgcgtttcatgtgttttataaggtttgttcctttgaagaattgtagttcttagtcccacagggaaatgtgtatctatttatatatcatagtataaatctatgatatatttatatcatatataaaagtctgagttctctttcttagtccctaatcatgtttctcccataggctgtgtttacatggagctatcggtttagccttttaagcttcattagcttgtctattattgaaatagtttccaagaaattttagatattatcataacatctgggtctactcaaacacttattgtttgaaagacttatgtcttggacctatcaaaaactgactttatttattgcttagtgaaaatactagtgggatcaacaatgattttcttgaatgggcatgaatggagatgcccgcacagtaatgtagaaatgtttcatacagctattaaaatgtaactgacctccttagaggcagattagtaactgttcctactttgtatagctaagtgacagtcacttaacttacatgactttcttttttcacattgggtctctggtcctgtgtcttcacctcatttatagcacgtctccttgatttttggtagtatcaacttcccagtgatctgttcagttaagttcttctcccgttaaccaggaagtgcttattctctcatcacagtgggaagaatagcctattgtctttcattttgcctgagtgtattttactatttgggctctgaaataaaaattatgaaatatggtgaggtcacatgttggtgctgccttgctgcataaaattctaggagggcaggttaggagacagttatgtatggcctttcgggaaaattcaaagggtgggattacaagggtgttcctcaggcatgcccctatgggccctatgtggaagcaagaagaattgactgatttacaggacttctctttatgtcaatcttaagaggatggatgaatctggacatttgttccacccgacctctgactgatggtttggaaaataactttaattaggatcatatgaccattgaaaaaggaaaaatgtagactctgacttccgtcccactgaaggattaatgaaaacctttactagcatttagagcttttcagaacatccccactgtcatgtgtctcagcagtggagactgcaagtaaggcttttaattttaggaggtttttttttttttttttttttcccctaaatggtatggccaaaagtcagagttaaaatatatatagttagattccaacttcctccttcactctaaaaatagaatccaaacccactcttcatatatgcttccagaatggggcttaagtaccaatctctgctttgcaatgggcacaatcttggtcatgtcctgaggctctctaagaaaagagaggatctaggatgggagagctagaaagttgctaactgggaagaacaaggccctgaggggttggtctaccaatctgggaagatttgaaaacaaacttctcgcaactgaaggaaggctgaaggctgctgcaagtcattgagtgactttaggatgagcaaaacattgggccacttcctaatgccctatgtgtatagtaccagaagcaaggtctcagacttaacagacccagctctgttccaaggtgagtctgaaccaatagaaagcaaacatgtgcagatatccaaacaagactgctcatgcaagtcggggctggctacccgtcttaggcagcaacagcagagctccagggagcttattcaatatttactgagacttcgaagacccagcagatgtttaatgaagtcactattttggctcaaaccctccacttctccccctcccctcaaaaagccaacaggtaaacacataaatgaaagaaacccacagaaggggatgggaaataaagaaaattctctcaagacttctccaggcccatgtcactggtcagcgtggtttttatgtgtattaggattgggggatgtgaagaaataagtatccagtactttataaccaaagcaattaaatgatattggggtagggaatgttggccagttttgtttagttttgccatcacattgtcacccagacctcacctagccccaagtaatcgggcgccccgaagagggagacagagatgtgccagagttgacccagtgtgcggatgataactactgacgaaagagtcatcgacctcagttagtggttggatgtagtcacattagtttgcctctccccatctttgtctccctggcaaggagaatatgcgggacatgatgctaagagccctgggtaaatgtggtgagaatgcacgcgtgcatatgctacacatatgtgcttctcagttgcagaaaatgaactgctttgggagattatcagtagaaagagtgttatcatattggtgctgagtgctatgtgtgcttatacaatttgttcttgtattttaataaactttgaataaaagaataaaaaaaaaaaaaaaaaaaaaaa

SEQ ID NO: 70 - DNA, 1325 bp, human
cagaagcggctagtggcggctgcctgcgtccccaaccccctccgcgcagcgctcgcgacacgcgtgccaggagtgggagcgagcggcggggccagctgcgttctgagcctgggcgcagctgccatctgctctgggaagcaccagggtgtccccgccgccctcagctcgaagtcagccaccatggaggcgcaggcacaaggtttgttggagactgaaccgttgcaaggaacagacgaagatgcagtagccagtgctgacttctctagcatgctctctgaggaggaaaaggaagagttaaaagcagagttagttcagctagaagacgaaattacaacactacgacaagttttgtcagcgaaagaaaggcatctagttgagataaaacaaaaactcggcatgaacctgatgaatgaattaaaacagaacttcagcaaaagctggcatgacatgcagactaccactgcctacaagaaaacacatgaaaccctgagtcacgcagggcaaaaggcaactgcagctttcagcaacgttggaacggccatcagcaagaagttcggagacatgagttactccattcgccattccataagtatgcctgctatgaggaattctcctactttcaaatcatttgaggagagggttgagacaactgtcacaagcctcaagacgaaagtaggcggtacgaaccctaatggaggcagttttgaggaggtcctcagctccacggcccatgccagtgcccagagcttggcaggaggctcccggcggaccaaggaggaggagctgcagtgctaagtccagccagcgtgcagctgcatccagaaaccggccactacccagcccatctctgcctgtgcttatccagataagaagaccaaaatcccgctgggaaaaacccaggccttgacattgttattcaaatggcccctccagaaagtttaatgatttccatttgtatttgtgttgatgatggaccacttgaccatcacatttcagtattcatagatgactgtcacattttaaaatgttcccacttgagcaggtacacaactggtcataattcctgtctgtgtaattcgatgtatatttttccaaacatgtagctattgtttgctttgatttttgcttggcctcctttatgatgtgcatgtccttgaaggctgaatgaacagtccctttcagttcagcagatcaacaggatggagctcttcatgactgtctccagcaataggatgatttactataaatttcatccaactacttgtgatctctctcacctacatcaattatgtatgttaatttcagcaattaaaagaattgatttt

SEQ ID NO: 71 - DNA, 952 bp, human
gcagctgcgctgcgactgctctggaaggagaggacggggcacaaaccctgaccatgaccccccacaggctgctgccaccgctgctgctgctgctagctctgctgctcgctgccagcccaggaggcgccttggcgcggtgcccaggctgcgggcaaggggtgcaggcgggttgtccagggggctgcgtggaggaggaggatggggggtcgccagccgagggctgcgcggaagctgagggctgtctcaggagggaggggcaggagtgcggggtctacacccctaactgcgccccaggactgcagtgccatccgcccaaggacgacgaggcgcctttgcgggcgctgctgctcggccgaggccgctgccttccggcccgcgcgcctgctgttgcagaggagaatcctaaggagagtaaaccccaagcaggcactgcccgcccacaggatgtgaaccgcagagaccaacagaggaatccaggcacctctaccacgccctcccagcccaattctgcgggtgtccaagacactgagatgggcccatgccgtagacatctggactcagtgctgcagcaactccagactgaggtctaccgaggggctcaaacactctacgtgcccaattgtgaccatcgaggcttctaccggaagcggcagtgccgctcctcccaggggcagcgccgaggtccctgctggtgtgtggatcggatgggcaagtccctgccagggtctccagatggcaatggaagctcctcctgccccactgggagtagcggctaaagctgggggatagaggggctgcagggccactggaaggaacatggagctgtcatcactcaacaaaaaaccgaggccctcaatccaccttcaggccccgccccatgggcccctcaccgctggttggaaagagtgttggtgttggctggggtgtcaataaagctgtgcttggggtcaaa

SEQ ID NO: 72 - DNA, 1963 bp, human
cgaacacctccaacatgaagcttcttcatgttttcctgttatttctgtgcttccacttaaggttttgcaaggtcacttatacatctcaagaggatctggtggagaaaaagtgcttagcaaaaaaatatactcacctctcctgcgataaagtcttctgccagccatggcagagatgcattgagggcacctgtgtttgtaaactaccgtatcagtgcccaaagaatggcactgcagtgtgtgcaactaacaggagaagcttcccaacatactgtcaacaaaagagtttggaatgtcttcatccagggacaaagtttttaaataacggaacatgcacagccgaaggaaagtttagtgtttccttgaagcatggaaatacagattcagagggaatagttgaagtaaaacttgtggaccaagataagacaatgttcatatgcaaaagcagctggagcatgagggaagccaacgtggcctgccttgaccttgggtttcaacaaggtgctgatactcaaagaaggtttaagttgtctgatctctctataaattccactgaatgtctacatgtgcattgccgaggattagagaccagtttggctgaatgtacttttactaagagaagaactatgggttaccaggatttcgctgatgtggtttgttatacacagaaagcagattctccaatggatgacttctttcagtgtgtgaatgggaaatacatttctcagatgaaagcctgtgatggtatcaatgattgtggagaccaaagtgatgaactgtgttgtaaagcatgccaaggcaaaggcttccattgcaaatcgggtgtttgcattccaagccagtatcaatgcaatggtgaggtggactgcattacaggggaagatgaagttggctgtgcaggctttgcatctgtggctcaagaagaaacagaaattttgactgctgacatggatgcagaaagaagacggataaaatcattattacctaaactatcttgtggagttaaaaacagaatgcacattcgaaggaaacgaattgtgggaggaaagcgagcacaactgggagacctcccatggcaggtggcaattaaggatgccagtggaatcacctgtgggggaatttatattggtggctgttggattctgactgctgcacattgtctcagagccagtaaaactcatcgttaccaaatatggacaacagtagtagactggatacaccccgaccttaaacgtatagtaattgaatacgtggatagaattattttccatgaaaactacaatgcaggcacttaccaaaatgacatcgctttgattgaaatgaaaaaagacggaaacaaaaaagattgtgagctgcctcgttccatccctgcctgtgtcccctggtctccttacctattccaacctaatgatacatgcatcgtttctggctggggacgagaaaaagataacgaaagagtcttttcacttcagtggggtgaagttaaactaataagcaactgctctaagttttacggaaatcgtttctatgaaaaagaaatggaatgtgcaggtacatatgatggttccatcgatgcctgtaaaggggactctggaggccccttagtctgtatggatgccaacaatgtgacttatgtctggggtgttgtgagttggggggaaaactgtggaaaaccagagttcccaggtttttacaccaaagtggccaattattttgactggattagctaccatgtaggaaggccttttatttctcagtacaatgtataaaattgtgatctctctcttcattctattctttttctctcaagagttccatttaatggaaataaaacggtataattaataattctctaggggggaaaaatgaagcaaatctcattggatatttttaaaggtctccacagagtttatgccatattggaattttgttgtataattctcaaataaatattttggtgaagcat

SEQ ID NO: 73 - DNA, 2823 bp, human
cccccgcgccgcgcagccccggccgccaggccttagcccgccccggcccccgccaggccgcgtccccctcccctcccctcccccgcgcgccacccgcgcccgcccccgcccggcaccgcggacccacccggacctcggcggggagatggaggtcctggcggcagagaccacgtcccagcaggagcggctgcaggccatcgcagagaagcggaagcggcaggcggagatcgagaacaagcgccggcagctggaggacgagcggaggcagctgcagcacctgaagtccaaggcactgcgggagcgctggctgctggaggggacgccgtcctcggcctcagagggggatgaggacctgaggaggcagatgcaggacgacgagcagaagacacggctgctggaggactcggtgtccaggttggagaaggaaattgaggtgctggagcgtggagactccgccccagccgctgccaaggagaacgcggcggccccgagcccagtccgggccccagccccgagtccagccaaggaggagcgcaagacagaggtggtgatgaattcacagcagacgccggtgggcacgcccaaagacaagcgagtctccaacacgcccctgaggacggttgacggctcccccatgatgaaggcagccatgtactcggttgagatcactgtggagaaggacaaggtgacaggggagaccagggtgctgtccagcaccacgctgctccctcggcagccgctccctctgggcatcaaagtctacgaggacgagaccaaagtggtccatgctgtggacggcaccgccgagaacgggatccaccccctgagctcctccgaggtggacgaactcatccacaaagcggacgaggtcacgctgagcgaggcagggtccacggccggggcggcagagacccggggggctgtggagggggcagcccggaccacgccctcccggcgggagatcaccggtgtgcaggcacagccaggcgaggccacgtccggcccgccggggatccagcccggccaggagcccccggtcacaatgatcttcatgggttaccagaacgtggaggatgaggccgagaccaagaaggtgctgggccttcaagataccatcacggcggagctggtggtcatcgaagacgcggctgagcccaaggagcctgcaccacccaacggcagtgctgccgagcctcccacggaggccgcctccagggaagagaatcaggcggggcccgaggccaccaccagcgacccccaggacctcgacatgaagaagcaccgttgtaaatgctgctccatcatgtgagccggcccccgagaccccggcccccaccccacaccacagacacccaccagcccggcccctcccggcgcctgcccaccctccacccacagcctcacgggtccaggacttggcgtgttgttacatgttccttccgagttttctttcgctggaaagagggacaggggcccccacccgtcaccacgccccaacactccccccgaaccagagccgtgcacttgtgcctggtaggagagagacaggacagacccgcttttcccgagacaaggaccccccatgtcacggcagcttcacagacgcggtcgcgcccaccggggtcctggcgggtgggacccgcagcctccacgcggcccaggccagcctgccaccctctgggcctcctacctgtgcctttctctgaggggacaccccgccagagagggccccgggagccgggggtgggtactgaggcctgctcaggccctggaagtgaggctctatggggttccctggccaaggcgctggccccccaatctcaggcagttggggtgaggccgtgcctctttgggggctaaaggtcttgggtggaggacaggcccctctgctgtgcccctatgccctgtgtgggcccaaccagtggacaatggagtctgggggagggggaaccccggggacatgcccccacccgggaggggccggtaacccctgggctatcttctagacggggcgaaccaggggtcattgacctgccccctgcacagggcagggaccgagtgagccactccttgtcccgagctcccgcccccactgggccctccttcctcctggtgctaatttggggaccccaggggccgcccccggcctcttctccatcctgcttggaccagggtcctgggtcttcccaaccataccccgagatcaggccccacctgccagctctactgggcttggagcacgtccgggcagtggagggagggacacagcctgggacaggaagcctcttgggttggagcaggagaccctcatttgccacccagaccaatgtgagcctgcccccaagccccctctcattggaagtggcaaggggcttccctcctgggggcagctacactcgtccccagaggcacattcgtgcacattctcacagacaccgtctcacacgttggctttggacaaccaggccccaacttggtccctgccctagggacctccagcctggtgcccagtgctcaggccacctcctggtccagtcaccacctgcagcctcggcagggcaggtacaggggccacctcggatgggagcctgggtccctgcctccgctctgcccctgggtggctgggaggagaggccctctcgggggtgacctgggcgtcagccgtggaaccccctcctcctccctggagtctgcctgagtccctcgagccgcgagccttcgctgaagtgcccttgctataaccccctctgcttctggtgtgtgacgaggcccccgatgttcttgattttcccagagaagcaaataaacagcgtgaacagcccc

SEQ ID NO: 74 - DNA, 3634 bp, human
caagactggaagcagagagagagagcaagagtgagagagagcgagcgagcgtagtcaggagatggtgttgtattccaggagaaaaacgtttcttcatttcaactcaaacttgctgctaaagcgcctaaatctgaaaaggaaatggacccagaatatgaagagaaaatgaaagccgaccgagcaaagagatttgaatttttactgaagcagacagaactttttgcacatttcattcagccttcagcacagaaatctccaacatctccactgaacatgaaattgggacgtccccgaataaagaaagatgaaaagcagagcttaatttctgctggagactaccgccataggcgcacagagcaagaagaagatgaagagctactgtctgagagtcggaaaacatctaatgtgtgtattagatttgaggtgtcaccttcatatgtgaaaggggggccactgagagattatcagattcgaggactgaattggttgatctctttatatgaaaatggagtcaatggcattttggctgatgaaatgggccttgggaaaactttacaaacaattgctttgcttggttacctgaaacactaccgaaatattcctggacctcacatggttttagttccaaagtctactttacacaactggatgaatgaatttaaacgatgggtcccatctctccgtgtcatttgttttgtcggagacaaggatgccagagctgcttttattcgtgatgaaatgatgccaggagagtgggatgtttgcgttacttcttatgagatggtaattaaagaaaaatctgtattcaaaaagtttcactggcgatacctggtcattgatgaagctcacagaataaagaatgaaaaatctaagctttcagagattgttcgtgagttcaagtcgactaaccgcttgctcctaactggaacacctttgcagaataacctgcatgaactgtgggccttactcaactttttattgcctgatgtctttaattctgcagatgactttgattcttggtttgacactaaaaattgtcttggtgatcaaaaactcgtggaaagacttcatgcagttttaaaaccatttttgttacgccgtataaaaactgatgtagagaagagtctgccacctaaaaaggaaataaagatttacttggggctgagtaagatgcaacgagaatggtatacaaaaatcctgatgaaagatattgatgttttaaactcttctggcaagatggacaagatgcgactcttaaacattctgatgcagcttcgaaagtgttgtaatcatccatatctgtttgatggtgctgaacctggtccaccttataccactgatgagcatattgtcagcaacagtggtaaaatggtagttctggataaactattggccaaactcaaagaacagggttcaagggttctcattttcagccagatgactcgcttgctggatattttggaagattattgcatgtggcgtggttatgagtattgtcgactggatggacaaaccccgcatgaagaaagagaggataaattcctagaagtggaatttctgggtcaaagggaagcaatagaggcttttaatgctcctaatagtagcaaattcatctttatgctaagtaccagggctggaggtctcggaattaacctggcaagtgctgatgtggttatactatatgattcagactggaacccacaggttgatctacaagctatggatcgagcacatcgtattggtcagaagaaaccagtacgtgtattccgtctcatcactgacaacactgttgaagagaggattgtagaaagagctgagataaaactgagactcgattcaattgttatacaacaaggaagactcattgaccaacggtctaacaagctggcaaaagaggaaatgttacaaatgatacggcatggagccacccatgtttttgcttctaaagagagtgagttgacagatgaagacattacaactattctggaaagaggggaaaagaagactgcagagatgaatgaacgcctgcaaaaaatgggagagtcttctctaagaaattttagaatggacattgaacaaagtttatacaaatttgagggagaagattatagagaaaaacagaagcttggcatggtggaatggattgaacctcctaaacgagaacgcaaagcaaactacgcagtggatgcctactttagagaggctttgcgtgtcagcgagccaaagattccaaaggctccacggcctccaaaacagccaaatgttcaggattttcaatttttcccaccacgcttatttgagctcctggaaaaggaaattctttattatcggaagacaataggctataaggttccaaggaatcctgatatcccaaatccagctctggctcaaagagaagagcaaaaaaagattgatggagctgaacctcttacaccagaagagactgaagaaaaggaaaaacttctcacacaaggtttcacaaactggactaaacgagattttaaccagtttattaaagctaatgagaaatatggaagagatgacattgataacatagctcgagaggtagagggcaaatcccctgaggaggtcatggagtattcagctgtattttgggaacgttgcaatgaattacaggacattgagaaaattatggctcaaattgaacgtggagaagcaagaattcaacgaaggatcagtatcaagaaagccctggatgccaaaattgcaagatacaaggctccatttcatcagttgcgcattcagtatggaaccagcaaaggaaagaactatactgaggaagaagatagattcttgatttgtatgttacacaaaatgggctttgatagagaaaatgtatatgaagaattaagacagtgtgtacgaaatgctccccagtttagatttgactggtttatcaagtctaggactgccatggaattccagagacgctgtaacactctgatttcattgattgagaaagaaaatatggaaattgaggaaagagagagagcagaaaagaagaaacgggcaactaaaactccaatggtaaaattttcagcattttcctaacttttagatttaacattgttgggccatttaaaatgtgcatattggagcagaacattaaatctgtttccattttagtcacagaaaagaaaagcagagtcagctactgagagctctggaaagaaggatgtcaagaaggtgaaatcctaaagcctagaaataaagttttaaatgggaaactgctattttcttgttcccatcttcaaatgctaattgccagttccagtgtattcatggtactctaagaaaaatctctttggttttgatttcttgcatattttatatattttacaatgctttctacctgaaatgtgtagctttatattttatggcattctagtatttttgtgtactgtattttgtgcatttcatgtcttcatcaaaatcctctcagtccttgttcttttgaagcttgtgctgaggttttagcttttctatgttttatatgccgctgctttgaaagagaacctagattctatagttgtattattgttgtttcatactttaaatttatatggctgtggaaaaacgaattaaaatgttttgaggagaaagaaaaaaaaaa

SEQ ID NO: 75 - DNA, 14082 bp, human
atgctgtctgtgaagctgaatctgtgagaacacctcactattcacggcaaccggagtggaagaaacaggtgcaaaaagattgtgtgtttgtctgcttttgtgaggctggtcagagattctgtgcctgctttatctgtgcttggctatgactctacctccaggtttaccataccccatagaatgtgtaagagaaaagtaccaacagggaaatcagcaaaaagctttcctatgaaggtgtgtagccagcctccgcagaatttgaaatgtctgaggtttcttctggtgagtaaaagctgcagataatcaacagccattcagaagaatgataaatgccacaagcatttggaaacaggcttccctaaagatgaaagagaagatgttcaaaagaaaacattcacaaaatgggtaaatgcacaattttctaagtttgggaagcagcatattgagaacctcttcagtgacctacaggatgggaggcgcctcctagacctcctcgaaggcctgacagggcaaaaactgccaaaagaaaaaggatccacaagagttcatgccctgaacaatgtcaacaaggcactgcgggttttgcagaacaataatgttgatttagtgaatattggaagtactgacatcgtagatggaaatcataaactgactcttggtttgatttggaatataatcctccactggcaggtcaaaaatgtaatgaaaaatatcatggctggattgcaacaaaccaacagtgaaaagattctcctgagctgggtccgacaatcaactcgtaattatccacaggttaatgtaatcaacttcaccaccagctggtctgatggcctggctttgaatgctctcatccatagtcataggccagacctatttgactggaatagtgtggtttgccagcagtcagccacacaacgactggaacatgcattcaacatcgccagatatcaattaggcatagagaaactactcgatcctgaagatgttgataccacctatccagataagaagtccatcttaatgtacatcacatcactcttccaagttttgcctcaacaagtgagcattgaagccatccaggaagtggaaatgttgccaaggccacctaaagtgactaaagaagaacattttcagttacatcatcaaatgcactattctcaacagatcacggtcagtctagcacagggatatgagagaacttcttcccctaagcctcgattcaagagctatgcctacacacaggctgcttatgtcaccacctctgaccctacacggagcccatttccttcacagcatttggaagctcctgaagacaagtcatttggcagttcattgatggagagtgaagtaaacctggaccgttatcaaacagctttagaagaagtattatcgtggcttctttctgctgaggacacattgcaagcacaaggagagatttctaatgatgtggaagtggtgaaagaccagtttcatactcatgaggggtacatgatggatttgacagcccatcagggccgggttggtaatattctacaattgggaagtaagctgattggaacaggaaaattatcagaagatgaagaaactgaagtacaagagcagatgaatctcctaaattcaagatgggaatgcctcagggtagctagcatggaaaaacaaagcaatttacatagagttttaatggatctccagaatcagaaactgaaagagttgaatgactggctaacaaaaacagaagaaagaacaaggaaaatggaggaagagcctcttggacctgatcttgaagacctaaaacgccaagtacaacaacataaggtgcttcaagaagatctagaacaagaacaagtcagggtcaattctctcactcacatggtggtggtagttgatgaatctagtggagatcacgcaactgctgctttggaagaacaacttaaggtattgggagatcgatgggcaaacatctgtagatggacagaagaccgctgggttcttttacaagacatccttctcaaatggcaacgtcttactgaagaacagtgcctttttagtgcatggctttcagaaaaagaagatgcagtgaacaagattcacacaactggctttaaagatcaaaatgaaatgttatcaagtcttcaaaaactggccgttttaaaagcggatctagaaaagaaaaagcaatccatgggcaaactgtattcactcaaacaagatcttctttcaacactgaagaataagtcagtgacccagaagacggaagcatggctggataactttgcccggtgttgggataatttagtccaaaaacttgaaaagagtacagcacagatttcacaggctgtcaccaccactcagccatcactaacacagacaactgtaatggaaacagtaactacggtgaccacaagggaacagatcctggtaaagcatgctcaagaggaacttccaccaccacctccccaaaagaagaggcagattactgtggattctgaaattaggaaaaggttggatgttgatataactgaacttcacagctggattactcgctcagaagctgtgttgcagagtcctgaatttgcaatctttcggaaggaaggcaacttctcagacttaaaagaaaaagtcaatgccatagagcgagaaaaagctgagaagttcagaaaactgcaagatgccagcagatcagctcaggccctggtggaacagatggtgaatgagggtgttaatgcagatagcatcaaacaagcctcagaacaactgaacagccggtggatcgaattctgccagttgctaagtgagagacttaactggctggagtatcagaacaacatcatcgctttctataatcagctacaacaattggagcagatgacaactactgctgaaaactggttgaaaatccaacccaccaccccatcagagccaacagcaattaaaagtcagttaaaaatttgtaaggatgaagtcaaccggctatcaggtcttcaacctcaaattgaacgattaaaaattcaaagcatagccctgaaagagaaaggacaaggacccatgttcctggatgcagactttgtggcctttacaaatcattttaagcaagtcttttctgatgtgcaggccagagagaaagagctacagacaatttttgacactttgccaccaatgcgctatcaggagaccatgagtgccatcaggacatgggtccagcagtcagaaaccaaactctccatacctcaacttagtgtcaccgactatgaaatcatggagcagagactcggggaattgcaggctttacaaagttctctgcaagagcaacaaagtggcctatactatctcagcaccactgtgaaagagatgtcgaagaaagcgccctctgaaattagccggaaatatcaatcagaatttgaagaaattgagggacgctggaagaagctctcctcccagctggttgagcattgtcaaaagctagaggagcaaatgaataaactccgaaaaattcagaatcacatacaaaccctgaagaaatggatggctgaagttgatgtttttctgaaggaggaatggcctgcccttggggattcagaaattctaaaaaagcagctgaaacagtgcagacttttagtcagtgatattcagacaattcagcccagtctaaacagtgtcaatgaaggtgggcagaagataaagaatgaagcagagccagagtttgcttcgagacttgagacagaactcaaagaacttaacactcagtgggatcacatgtgccaacaggtctatgccagaaaggaggccttgaagggaggtttggagaaaactgtaagcctccagaaagatctatcagagatgcacgaatggatgacacaagctgaagaagagtatcttgagagagattttgaatataaaactccagatgaattacagaaagcagttgaagagatgaagagagctaaagaagaggcccaacaaaaagaagcgaaagtgaaactccttactgagtctgtaaatagtgtcatagctcaagctccacctgtagcacaagaggccttaaaaaaggaacttgaaactctaaccaccaactaccagtggctctgcactaggctgaatgggaaatgcaagactttggaagaagtttgggcatgttggcatgagttattgtcatacttggagaaagcaaacaagtggctaaatgaagtagaatttaaacttaaaaccactgaaaacattcctggcggagctgaggaaatctctgaggtgctagattcacttgaaaatttgatgcgacattcagaggataacccaaatcagattcgcatattggcacagaccctaacagatggcggagtcatggatgagctaatcaatgaggaacttgagacatttaattctcgttggagggaactacatgaagaggctgtaaggaggcaaaagttgcttgaacagagcatccagtctgcccaggagactgaaaaatccttacacttaatccaggagtccctcacattcattgacaagcagttggcagcttatattgcagacaaggtggacgcagctcaaatgcctcaggaagcccagaaaatccaatctgatttgacaagtcatgagatcagtttagaagaaatgaagaaacataatcaggggaaggaggctgcccaaagagtcctgtctcagattgatgttgcacagaaaaaattacaagatgtctccatgaagtttcgattattccagaaaccagccaattttgagcagcgtctacaagaaagtaagatgattttagatgaagtgaagatgcacttgcctgcattggaaacaaagagtgtggaacaggaagtagtacagtcacagctaaatcattgtgtgaacttgtataaaagtctgagtgaagtgaagtctgaagtggaaatggtgataaagactggacgtcagattgtacagaaaaagcagacggaaaatcccaaagaacttgatgaaagagtaacagctttgaaattgcattataatgagctgggagcaaaggtaacagaaagaaagcaacagttggagaaatgcttgaaattgtcccgtaagatgcgaaaggaaatgaatgtcttgacagaatggctggcagctacagatatggaattgacaaagagatcagcagttgaaggaatgcctagtaatttggattctgaagttgcctggggaaaggctactcaaaaagagattgagaaacagaaggtgcacctgaagagtatcacagaggtaggagaggccttgaaaacagttttgggcaagaaggagacgttggtggaagataaactcagtcttctgaatagtaactggatagctgtcacctcccgagcagaagagtggttaaatcttttgttggaataccagaaacacatggaaacttttgaccagaatgtggaccacatcacaaagtggatcattcaggctgacacacttttggatgaatcagagaaaaagaaaccccagcaaaaagaagacgtgcttaagcgtttaaaggcagaactgaatgacatacgcccaaaggtggactctacacgtgaccaagcagcaaacttgatggcaaaccgcggtgaccactgcaggaaattagtagagccccaaatctcagagctcaaccatcgatttgcagccatttcacacagaattaagactggaaaggcctccattcctttgaaggaattggagcagtttaactcagatatacaaaaattgcttgaaccactggaggctgaaattcagcagggggtgaatctgaaagaggaagacttcaataaagatatgaatgaagacaatgagggtactgtaaaagaattgttgcaaagaggagacaacttacaacaaagaatcacagatgagagaaagcgagaggaaataaagataaaacagcagctgttacagacaaaacataatgctctcaaggatttgaggtctcaaagaagaaaaaaggctctagaaatttctcatcagtggtatcagtacaagaggcaggctgatgatctcctgaaatgcttggatgacattgaaaaaaaattagccagcctacctgagcccagagatgaaaggaaaataaaggaaattgatcgggaattgcagaagaagaaagaggagctgaatgcagtgcgtaggcaagctgagggcttgtctgaggatggggccgcaatggcagtggagccaactcagatccagctcagcaagcgctggcgggaaattgagagcaaatttgctcagtttcgaagactcaactttgcacaaattcacactgtccgtgaagaaacgatgatggtgatgactgaagacatgcctttggaaatttcttatgtgccttctacttatttgactgaaatcactcatgtctcacaagccctattagaagtggaacaacttctcaatgctcctgacctctgtgctaaggactttgaagatctctttaagcaagaggagtctctgaagaatataaaagatagtctacaacaaagctcaggtcggattgacattattcatagcaagaagacagcagcattgcaaagtgcaacgcctgtggaaagggtgaagctacaggaagctctctcccagcttgatttccaatgggaaaaagttaacaaaatgtacaaggaccgacaagggcgatttgacagatctgttgagaaatggcggcgttttcattatgatataaagatatttaatcagtggctaacagaagctgaacagtttctcagaaagacacaaattcctgagaattgggaacatgctaaatacaaatggtatcttaaggaactccaggatggcattgggcagcggcaaactgttgtcagaacattgaatgcaactggggaagaaataattcagcaatcctcaaaaacagatgccagtattctacaggaaaaattgggaagcctgaatctgcggtggcaggaggtctgcaaacagctgtcagacagaaaaaagaggctagaagaacaaaagaatatcttgtcagaatttcaaagagatttaaatgaatttgttttatggttggaggaagcagataacattgctagtatcccacttgaacctggaaaagagcagcaactaaaagaaaagcttgagcaagtcaagttactggtggaagagttgcccctgcgccagggaattctcaaacaattaaatgaaactggaggacccgtgcttgtaagtgctcccataagcccagaagagcaagataaacttgaaaataagctcaagcagacaaatctccagtggataaaggtttccagagctttacctgagaaacaaggagaaattgaagctcaaataaaagaccttgggcagcttgaaaaaaagcttgaagaccttgaagagcagttaaatcatctgctgctgtggttatctcctattaggaatcagttggaaatttataaccaaccaaaccaagaaggaccatttgacgttcaggaaactgaaatagcagttcaagctaaacaaccggatgtggaagagattttgtctaaagggcagcatttgtacaaggaaaaaccagccactcagccagtgaagaggaagttagaagatctgagctctgagtggaaggcggtaaaccgtttacttcaagagctgagggcaaagcagcctgacctagctcctggactgaccactattggagcctctcctactcagactgttactctggtgacacaacctgtggttactaaggaaactgccatctccaaactagaaatgccatcttccttgatgttggaggtacctgctctggcagatttcaaccgggcttggacagaacttaccgactggctttctctgcttgatcaagttataaaatcacagagggtgatggtgggtgaccttgaggatatcaacgagatgatcatcaagcagaaggcaacaatgcaggatttggaacagaggcgtccccagttggaagaactcattaccgctgcccaaaatttgaaaaacaagaccagcaatcaagaggctagaacaatcattacggatcgaattgaaagaattcagaatcagtgggatgaagtacaagaacaccttcagaaccggaggcaacagttgaatgaaatgttaaaggattcaacacaatggctggaagctaaggaagaagctgagcaggtcttaggacaggccagagccaagcttgagtcatggaaggagggtccctatacagtagatgcaatccaaaagaaaatcacagaaaccaagcagttggccaaagacctccgccagtggcagacaaatgtagatgtggcaaatgacttggccctgaaacttctccgggattattctgcagatgataccagaaaagtccacatgataacagagaatatcaatgcctcttggagaagcattcataaaagggtgagtgagcgagaggctgctttggaagaaactcatagattactgcaacagttccccctggacctggaaaagtttcttgcctggcttacagaagctgaaacaactgccaatgtcctacaggatgctacccgtaaggaaaggctcctagaagactccaagggagtaaaagagctgatgaaacaatggcaagacctccaaggtgaaattgaagctcacacagatgtttatcacaacctggatgaaaacagccaaaaaatcctgagatccctggaaggttccgatgatgcagtcctgttacaaagacgtttggataacatgaacttcaagtggagtgaacttcggaaaaagtctctcaacattaggtcccatttggaagccagttctgaccagtggaagcgtctgcacctttctctgcaggaacttctggtgtggctacagctgaaagatgatgaattaagccggcaggcacctattggaggcgactttccagcagttcagaagcagaacgatgtacatagggccttcaagagggaattgaaaactaaagaacctgtaatcatgagtactcttgagactgtacgaatatttctgacagagcagcctttggaaggactagagaaactctaccaggagcccagagagctgcctcctgaggagagagcccagaatgtcactcggcttctacgaaagcaggctgaggaggtcaatactgagtgggaaaaattgaacctgcactccgctgactggcagagaaaaatagatgagacccttgaaagactccaggaacttcaagaggccacggatgagctggacctcaagctgcgccaagctgaggtgatcaagggatcctggcagcccgtgggcgatctcctcattgactctctccaagatcacctcgagaaagtcaaggcacttcgaggagaaattgcgcctctgaaagagaacgtgagccacgtcaatgaccttgctcgccagcttaccactttgggcattcagctctcaccgtataacctcagcactctggaagacctgaacaccagatggaagcttctgcaggtggccgtcgaggaccgagtcaggcagctgcatgaagcccacagggactttggtccagcatctcagcactttctttccacgtctgtccagggtccctgggagagagccatctcgccaaacaaagtgccctactatatcaaccacgagactcaaacaacttgctgggaccatcccaaaatgacagagctctaccagtctttagctgacctgaataatgtcagattctcagcttataggactgccatgaaactccgaagactgcagaaggccctttgcttggatctcttgagcctgtcagctgcatgtgatgccttggaccagcacaacctcaagcaaaatgaccagcccatggatatcctgcagattattaattgtttgaccactatttatgaccgcctggagcaagagcacaacaatttggtcaacgtccctctctgcgtggatatgtgtctgaactggctgctgaatgtttatgatacgggacgaacagggaggatccgtgtcctgtcttttaaaactggcatcatttccctgtgtaaagcacatttggaagacaagtacagataccttttcaagcaagtggcaagttcaacaggattttgtgaccagcgcaggctgggcctccttctgcatgattctatccaaattccaagacagttgggtgaagttgcatcctttgggggcagtaacattgagccaagtgtccggagctgcttccaatttgctaataataagccagagatcgaagcggccctcttcctagactggatgagactggaaccccagtccatggtgtggctgcccgtcctgcacagagtggctgctgcagaaactgccaagcatcaggccaaatgtaacatctgcaaagagtgtccaatcattggattcaggtacaggagtctaaagcactttaattatgacatctgccaaagctgctttttttctggtcgagttgcaaaaggccataaaatgcactatcccatggtggaatattgcactccgactacatcaggagaagatgttcgagactttgccaaggtactaaaaaacaaatttcgaaccaaaaggtattttgcgaagcatccccgaatgggctacctgccagtgcagactgtcttagagggggacaacatggaaactcccgttactctgatcaacttctggccagtagattctgcgcctgcctcgtcccctcagctttcacacgatgatactcattcacgcattgaacattatgctagcaggctagcagaaatggaaaacagcaatggatcttatctaaatgatagcatctctcctaatgagagcatagatgatgaacatttgttaatccagcattactgccaaagtttgaaccaggactcccccctgagccagcctcgtagtcctgcccagatcttgatttccttagagagtgaggaaagaggggagctagagagaatcctagcagatcttgaggaagaaaacaggaatctgcaagcagaatatgaccgtctaaagcagcagcacgaacataaaggcctgtccccactgccgtcccctcctgaaatgatgcccacctctccccagagtccccgggatgctgagctcattgctgaggccaagctactgcgtcaacacaaaggccgcctggaagccaggatgcaaatcctggaagaccacaataaacagctggagtcacagttacacaggctaaggcagctgctggagcaaccccaggcagaggccaaagtgaatggcacaacggtgtcctctccttctacctctctacagaggtccgacagcagtcagcctatgctgctccgagtggttggcagtcaaacttcggactccatgggtgaggaagatcttctcagtcctccccaggacacaagcacagggttagaggaggtgatggagcaactcaacaactccttccctagttcaagaggaagaaatacccctggaaagccaatgagagaggacacaatgtaggaagtcttttccacatggcagatgatttgggcagagcgatggagtccttagtatcagtcatgacagatgaagaaggagcagaataaatgttttacaactcctgattcccgcatggtttttataatattcatacaacaaagaggattagacagtaagagtttacaagaaataaatctatatttttgtgaagggtagtggtattatactgtagatttcagtagtttctaagtctgttattgttttgttaacaatggcaggttttacacgtctatgcaattgtacaaaaaagttataagaaaactacatgtaaaatcttgatagctaaataacttgccatttctttatatggaacgcattttgggttgtttaaaaatttataacagttataaagaaagattgtaaactaaagtgtgctttataaaaaaaagttgtttataaaaacccctaaaaacaaaacaaacacacacacacacacatacacacacacacacaaaactttgaggcagcgcattgttttgcatccttttggcgtgatatccatatgaaattcatggctttttctttttttgcatattaaagataagacttcctctaccaccacaccaaatgactactacacactgctcatttgagaactgtcagctgagtggggcaggcttgagttttcatttcatatatctatatgtctataagtatataaatactatagttatatagataaagagatacgaatttctatagactgactttttccattttttaaatgttcatgtcacatcctaatagaaagaaattacttctagtcagtcatccaggcttacctgcttggtctagaatggatttttcccggagccggaagccaggaggaaactacaccacactaaaacattgtctacagctccagatgtttctcattttaaacaactttccactgacaacgaaagtaaagtaaagtattggatttttttaaagggaacatgtgaatgaatacacaggacttattatatcagagtgagtaatcggttggttggttgattgattgattgattgatacattcagcttcctgctgctagcaatgccacgatttagatttaatgatgcttcagtggaaatcaatcagaaggtattctgaccttgtgaacatcagaaggtattttttaactcccaagcagtagcaggacgatgatagggctggagggctatggattcccagcccatccctgtgaaggagtaggccactctttaagtgaaggattggatgattgttcataatacataaagttctctgtaattacaactaaattattatgccctcttctcacagtcaaaaggaactgggtggtttggtttttgttgcttttttagatttattgtcccatgtgggatgagtttttaaatgccacaagacataatttaaaataaataaactttgggaaaaggtgtaagacagtagccccatcacatttgtgatactgacaggtatcaacccagaagcccatgaactgtgtttccatcctttgcatttctctgcgagtagttccacacaggtttgtaagtaagtaagaaagaaggcaaattgattcaaatgttacaaaaaaacccttcttggtggattagacaggttaaatatataaacaaacaaacaaaaattgctcaaaaaagaggagaaaagctcaagaggaaaagctaaggactggtaggaaaaagctttactctttcatgccattttatttctttttgatttttaaatcattcattcaatagataccaccgtgtgacctataattttgcaaatctgttacctctgacatcaagtgtaattagcttttggagagtgggctgacatcaagtgtaattagcttttggagagtgggttttgtccattattaataattaattaattaacatcaaacacggcttctcatgctatttctacctcactttggttttggggtgttcctgataattgtgcacacctgagttcacagcttcaccacttgtccattgcgttattttctttttcctttataattctttctttttccttcataattttcaaaagaaaacccaaagctctaaggtaacaaattaccaaattacatgaagatttggtttttgtcttgcatttttttcctttatgtgacgctggaccttttctttacccaaggatttttaaaactcagatttaaaacaaggggttactttacatcctactaagaagtttaagtaagtaagtttcattctaaaatcagaggtaaatagagtgcataaataattttgttttaatctttttgtttttcttttagacacattagctctggagtgagtctgtcataatatttgaacaaaaattgagagctttattgctgcattttaagcataattaatttggacattatttcgtgttgtgttctttataaccaccgagtattaaactgtaaatcataatgtaactgaagcataaacatcacatggcatgttttgtcattgttttcaggtactgagttcttacttgagtatcataatatattgtgttttaacaccaacactgtaacatttacgaattatttttttaaacttcagttttactgcattttcacaacatatcagacttcaccaaatatatgccttactattgtattatagtactgctttactgtgtatctcaataaagcacgcagttatgttac

SEQ ID NO: 76 - DNA, 1152 bp, human
cgctcctcgggctgcccctcggttgacaatggtctccaggatggtctctaccatgctatctggcctactgttttggctggcatctggatggactccagcatttgcttacagcccccggacccctgaccgggtctcagaagcagatatccagaggctgcttcatggtgttatggagcaattgggcattgccaggccccgagtggaatatccagctcaccaggccatgaatcttgtgggcccccagagcattgaaggtggagctcatgaaggacttcagcatttgggtccttttggcaacatccccaacatcgtggcagagttgactggagacaacattcctaaggactttagtgaggatcaggggtacccagaccctccaaatccctgtcctgttggaaaaacagatgatggatgtctagaaaacacccctgacactgcagagttcagtcgagagttccagttgcaccagcatctctttgatccggaacatgactatccaggcttgggcaagtggaacaagaaactcctttacgagaagatgaagggaggagagagacgaaagcggaggagtgtcaatccatatctacaaggacagagactggataatgttgttgcaaagaagtctgtcccccatttttcagatgaggataaggatccagagtaaagagaagatgctagacgaaaacccacattacctgttaggcctcagcatggcttatgtgcacgtgtaaatggagtccctgtgaatgacagcatgtttcttacatagataattatggatacaaagcagctgtatgtagatagtgtattgtcttcacaccgatgattctgctttttgctaaattagaataagagcttttttgtttcttgggtttttaaaatgtgaatctgcaatgatcataaaaattaaaatgtgaatgtcaacaataaaaagcaagactatgaaaggctcagatttcttgcagtttaaaatggtgtctgaggttgtactattttggccaagtctgtagaaagctgtcatttgattttgattatgtagttcatccagcccttgggcattgttatacaccagtaaagaaggctgtactcaagaggaggagctgacacatttcacttggctgcgtcttaataaacatgaatgcaagcattggc

SEQ ID NO: 77 - DNA, 3270 bp, human
ggccgcgggcaccagagtgccgagcccaggacgcccccggcccaggcccttggggtggacaagtccttcacttctcgccggagtgtgtggaggagcgatgggcagaaccagcacttccctcaggcactagacctgtcacgagtgaacttagttccctcctatactccttcactctaccctaagaacacagatctatttgagatgattgagaagatgcagggaagcaggatggatgaacaacgctgctccttcccgccgcccctcaaaacagaggaggactacattccatacccgagcgtgcacgaggtcttggggcgagaaggacccttccccctcatcctgctgccccagtttgggggctactggattgagggcaccaaccacgaaatcaccagcatccccgagacagagccactgcagtcgcccacaaccaaggtgaagctcgagtgcaaccccacagcccgcatctaccggaagcactttctcggcaaggagcatttcaattactactcactggacactgccctcggccaccttgtcttctcactcaagtacgatgtcatcggggaccaagagcacctgcggctgctgctcaggaccaagtgccggacataccatgatgtcatccccatctcctgcctcaccgagttccctaatgttgtccagatggcaaagttggtgtgtgaagacgtcaatgtggatcggttctatcctgtgctctaccccaaggcttcccggctcatcgtcacctttgacgagcatgtcatcagcaataacttcaagtttggcgtcatttatcagaagcttgggcagacctccgaggaagaactcttcagcaccaatgaggaaagtcccgctttcgtggagttccttgaatttcttggccagaaggtcaaactgcaggactttaaggggttccgaggaggcctggacgtgacccacgggcagacggggaccgaatctgtgtactgcaacttccgcaacaaggagatcatgtttcacgtgtccaccaagctgccatacacggaaggggacgcccagcagttgcagcggaagcggcacatcgggaacgacatcgtggctgtggtcttccaggatgaaaacactcctttcgtgcccgacatgatcgcgtccaacttcctgcatgcctacgtcgtggtgcaggctgagggcgggggccctgatggccccctctacaaggtctctgtcactgcaagagatgatgtgcccttctttggaccccccctcccggaccccgctgtgttcaggaaggggcctgagttccaggaatttttgctgacaaagctgatcaatgctgaatatgcctgctacaaggcagagaagtttgccaaactggaggagcggacgcgggccgccctcctggagacgctctatgaggaactacacatccacagccagtccatgatgggcttgggcggcgacgaggacaagatggagaatggcagtgggggcggcggcttctttgagtctttcaagcgggtcatccggagccgcagccagtccatggatgccatggggctgagcaacaagaagcccaacaccgtgtccaccagccacagcgggagcttcgcgcccaacaaccccgacctggccaaggcggctggaatatcactgattgtccctgggaagagccccacgaggaagaagtcgggcccgttcggctcccgccgcagcagcgccattggcatcgagaacatacaggaggtgcaggagaagagggagagccctccggctggtcagaagaccccagacagcgggcacgtctcacaggagcccaagtcggagaactcatccactcagagctccccagagatgcccacgaccaagaacagagcggagaccgcagcgcagagagcagaggcgctcaaggacttctcccgctcctcgtccagtgccagcagcttcgccagcgtggtggaggagacggagggtgtggacggagaggacacaggcctggagagcgtgtcatcctcaggaacaccccacaagcgggactccttcatctatagcacgtggctggaggacagtgtcagcaccactagtgggggcagctccccaggcccctctcgatcaccccacccagacgccggcaagttgggggaccctgcgtgtcccgagatcaagatccagctggaagcatctgagcagcacatgccccagctgggctgttagccgggccaccccctctgaaggtgaaactgagcagatgaggccacagaagcacaaggggaaggtgccgtgtcaagcccaggcagacgagacctctgccctgaagaccaacaccagcccgtgggctgccccctgcctccccaccctccccatggcccacccatctgggctgtctctgcagggcagagccgtccagacctgggatcagggaagctgctggcatcgtccccacccccagcctgggggtctgcgctggggcagggattgctcagtggaagcaggactgggggtctggcttgccccctccctgggcctccatcacccctgagcatccctctggactcagagggaacaaggtgggagagagagtttgagacagctccgtgtggagagcttagcccctggaggcagcacaaggaggatgtgatatgtgggggagtgagcactgggttgggagccgggtcctggtttccaatttgggttctgctgtgtgactctgggcaagtcactctccctctctgggcatgtctgctacaaatggacaagattatttcagaggtcactgaagactgtgattacatgcacctgccttagaaggtaggattttcttcccagggacctcctatcaccctaccctgcttcttgaggtccctggagccccaggtgggctgaggggcagggagccggctgtgcccagtatgcctcctggaccctccagttctgccacaggtctgccgatgccctgtccactgcctacacatgacagacaagtaaccccctcatgggggatggggacctacctggctcctcagccagcacccagcttaacccctgccatcccatgctgggccctccaggccaagagtctcagctggccgagagtccaggccttgcctcccccgaccgccatggagggggcagcccggcacagctgctgggagcccttgtgtgtctggtcacactttttaggcgtcacgccaaaggccagcctcctggccccaatacccattttggaagcccctgtggccgtgtggatgtcggtaacagttgtataaaataaattctatttatcgctattgt

SEQ ID NO: 78 - DNA, 5830 bp, human
actgagtcccgggaccccgggagagcggtcagtgtgtggtcgctgcgtttcctctgcctgcgccgggcatcacttgcgcgccgcagaaagtccgtctggcagcctggatatcctctcctaccggcacccgcagacgcccctgcagccgccggtcggcgcccgggctccctagccctgtgcgctcaactgtcctgcgctgcggggtgccgcgagttccacctccgcgcctccttctctagacaggcgctgggagaaagaaccggctcccgagttctgggcatttcgcccggctcgaggtgcaggatgcagagcaaggtgctgctggccgtcgccctgtggctctgcgtggagacccgggccgcctctgtgggtttgcctagtgtttctcttgatctgcccaggctcagcatacaaaaagacatacttacaattaaggctaatacaactcttcaaattacttgcaggggacagagggacttggactggctttggcccaataatcagagtggcagtgagcaaagggtggaggtgactgagtgcagcgatggcctcttctgtaagacactcacaattccaaaagtgatcggaaatgacactggagcctacaagtgcttctaccgggaaactgacttggcctcggtcatttatgtctatgttcaagattacagatctccatttattgcttctgttagtgaccaacatggagtcgtgtacattactgagaacaaaaacaaaactgtggtgattccatgtctcgggtccatttcaaatctcaacgtgtcactttgtgcaagatacccagaaaagagatttgttcctgatggtaacagaatttcctgggacagcaagaagggctttactattcccagctacatgatcagctatgctggcatggtcttctgtgaagcaaaaattaatgatgaaagttaccagtctattatgtacatagttgtcgttgtagggtataggatttatgatgtggttctgagtccgtctcatggaattgaactatctgttggagaaaagcttgtcttaaattgtacagcaagaactgaactaaatgtggggattgacttcaactgggaatacccttcttcgaagcatcagcataagaaacttgtaaaccgagacctaaaaacccagtctgggagtgagatgaagaaatttttgagcaccttaactatagatggtgtaacccggagtgaccaaggattgtacacctgtgcagcatccagtgggctgatgaccaagaagaacagcacatttgtcagggtccatgaaaaaccttttgttgcttttggaagtggcatggaatctctggtggaagccacggtgggggagcgtgtcagaatccctgcgaagtaccttggttacccacccccagaaataaaatggtataaaaatggaataccccttgagtccaatcacacaattaaagcggggcatgtactgacgattatggaagtgagtgaaagagacacaggaaattacactgtcatccttaccaatcccatttcaaaggagaagcagagccatgtggtctctctggttgtgtatgtcccaccccagattggtgagaaatctctaatctctcctgtggattcctaccagtacggcaccactcaaacgctgacatgtacggtctatgccattcctcccccgcatcacatccactggtattggcagttggaggaagagtgcgccaacgagcccagccaagctgtctcagtgacaaacccatacccttgtgaagaatggagaagtgtggaggacttccagggaggaaataaaattgaagttaataaaaatcaatttgctctaattgaaggaaaaaacaaaactgtaagtacccttgttatccaagcggcaaatgtgtcagctttgtacaaatgtgaagcggtcaacaaagtcgggagaggagagagggtgatctccttccacgtgaccaggggtcctgaaattactttgcaacctgacatgcagcccactgagcaggagagcgtgtctttgtggtgcactgcagacagatctacgtttgagaacctcacatggtacaagcttggcccacagcctctgccaatccatgtgggagagttgcccacacctgtttgcaagaacttggatactctttggaaattgaatgccaccatgttctctaatagcacaaatgacattttgatcatggagcttaagaatgcatccttgcaggaccaaggagactatgtctgccttgctcaagacaggaagaccaagaaaagacattgcgtggtcaggcagctcacagtcctagagcgtgtggcacccacgatcacaggaaacctggagaatcagacgacaagtattggggaaagcatcgaagtctcatgcacggcatctgggaatccccctccacagatcatgtggtttaaagataatgagacccttgtagaagactcaggcattgtattgaaggatgggaaccggaacctcactatccgcagagtgaggaaggaggacgaaggcctctacacctgccaggcatgcagtgttcttggctgtgcaaaagtggaggcatttttcataatagaaggtgcccaggaaaagacgaacttggaaatcattattctagtaggcacggcggtgattgccatgttcttctggctacttcttgtcatcatcctacggaccgttaagcgggccaatggaggggaactgaagacaggctacttgtccatcgtcatggatccagatgaactcccattggatgaacattgtgaacgactgccttatgatgccagcaaatgggaattccccagagaccggctgaagctaggtaagcctcttggccgtggtgcctttggccaagtgattgaagcagatgcctttggaattgacaagacagcaacttgcaggacagtagcagtcaaaatgttgaaagaaggagcaacacacagtgagcatcgagctctcatgtctgaactcaagatcctcattcatattggtcaccatctcaatgtggtcaaccttctaggtgcctgtaccaagccaggagggccactcatggtgattgtggaattctgcaaatttggaaacctgtccacttacctgaggagcaagagaaatgaatttgtcccctacaagaccaaaggggcacgattccgtcaagggaaagactacgttggagcaatccctgtggatctgaaacggcgcttggacagcatcaccagtagccagagctcagccagctctggatttgtggaggagaagtccctcagtgatgtagaagaagaggaagctcctgaagatctgtataaggacttcctgaccttggagcatctcatctgttacagcttccaagtggctaagggcatggagttcttggcatcgcgaaagtgtatccacagggacctggcggcacgaaatatcctcttatcggagaagaacgtggttaaaatctgtgactttggcttggcccgggatatttataaagatccagattatgtcagaaaaggagatgctcgcctccctttgaaatggatggccccagaaacaatttttgacagagtgtacacaatccagagtgacgtctggtcttttggtgttttgctgtgggaaatattttccttaggtgcttctccatatcctggggtaaagattgatgaagaattttgtaggcgattgaaagaaggaactagaatgagggcccctgattatactacaccagaaatgtaccagaccatgctggactgctggcacggggagcccagtcagagacccacgttttcagagttggtggaacatttgggaaatctcttgcaagctaatgctcagcaggatggcaaagactacattgttcttccgatatcagagactttgagcatggaagaggattctggactctctctgcctacctcacctgtttcctgtatggaggaggaggaagtatgtgaccccaaattccattatgacaacacagcaggaatcagtcagtatctgcagaacagtaagcgaaagagccggcctgtgagtgtaaaaacatttgaagatatcccgttagaagaaccagaagtaaaagtaatcccagatgacaaccagacggacagtggtatggttcttgcctcagaagagctgaaaactttggaagacagaaccaaattatctccatcttttggtggaatggtgcccagcaaaagcagggagtctgtggcatctgaaggctcaaaccagacaagcggctaccagtccggatatcactccgatgacacagacaccaccgtgtactccagtgaggaagcagaacttttaaagctgatagagattggagtgcaaaccggtagcacagcccagattctccagcctgactcggggaccacactgagctctcctcctgtttaaaaggaagcatccacaccccaactcccggacatcacatgagaggtctgctcagattttgaagtgttgttctttccaccagcaggaagtagccgcatttgattttcatttcgacaacagaaaaaggacctcggactgcagggagccagtcttctaggcatatcctggaagaggcttgtgacccaagaatgtgtctgtgtcttctcccagtgttgacctgatcctcttttttcattcatttaaaaagcattatcatgcccctgctgcgggtctcaccatgggtttagaacaaagagcttcaagcaatggccccatcctcaaagaagtagcagtacctggggagctgacacttctgtaaaactagaagataaaccaggcaacgtaagtgttcgaggtgttgaagatgggaaggatttgcagggctgagtctatccaagaggctttgtttaggacgtgggtcccaagccaagccttaagtgtggaattcggattgatagaaaggaagactaacgttaccttgctttggagagtactggagcctgcaaatgcattgtgtttgctctggtggaggtgggcatggggtctgttctgaaatgtaaagggttcagacggggtttctggttttagaaggttgcgtgttcttcgagttgggctaaagtagagttcgttgtgctgtttctgactcctaatgagagttccttccagaccgttagctgtctccttgccaagccccaggaagaaaatgatgcagctctggctccttgtctcccaggctgatcctttattcagaataccacaaagaaaggacattcagctcaaggctccctgccgtgttgaagagttctgactgcacaaaccagcttctggtttcttctggaatgaataccctcatatctgtcctgatgtgatatgtctgagactgaatgcgggaggttcaatgtgaagctgtgtgtggtgtcaaagtttcaggaaggattttacccttttgttcttccccctgtccccaacccactctcaccccgcaacccatcagtattttagttatttggcctctactccagtaaacctgattgggtttgttcactctctgaatgattattagccagacttcaaaattattttatagcccaaattataacatctattgtattatttagacttttaacatatagagctatttctactgatttttgcccttgttctgtcctttttttcaaaaaagaaaatgtgttttttgtttggtaccatagtgtgaaatgctgggaacaatgactataagacatgctatggcacatatatttatagtctgtttatgtagaaacaaatgtaatatattaaagccttatatataatgaactttgtactattcacattttgtatcagtattatgtagcataacaaaggtcataatgctttcagcaattgatgtcattttattaaagaacattgaaaaacttga

SEQ ID NO: 79 - DNA, 2340 bp, human
gcggccgcgtcgacccggcgcagaaaccgtaaaaggctggagcgggcggggtaggtgtggctctgtgtgcgtgacctgagccccggtcccagtccctgtagtctcctgcggccgcggcctctcagccatgggcgccgtctggtccgccctgctggttggagggggtctggccggagcacttttcgtttggctgctgcggggcggccctggcgacaccgggaaggacggggatgcggagcaggagaaagacgcccctcttgggggagctgcgattccgggaggccatcagagtggcagcagcggactgagccctggaccttccgggcaggagctggtcaccaaaccagagcatcttcaagaaagcaatggacatttgatttctaagaccaaagaccttggtaaactgcaagcagcatcatggagattgcagaatccttccagggaagtctgtgacaattcaagagaacatgttccttctggacagtttccagacacagaagctccagctacctctgagaccagtaactctaggagttactctgaagtttcaagaaatgaaagccttgaatctcctatgggagaatggggattccaaaaaggacaagagatatctgctaaagcagctacatgttttgcagagaagttgccttctagcaacctgctcaagaacagagctaaagaagaaatgagcctctctgatttgaacagtcaggaccgggttgaccacgaggagtgggaaatggtgcctaggcactcatcttggggggatgttggtgtgggtggcagtcttaaggctccagtgttaaacctaaaccagggaatggacaatggaagaagcactttggtggaagcaagaggtcagcaagtgcatgggaaaatggaaagggtagcagtgatgcctgcagggtctcagcaagttagtgtcaggttccaggtccattatgtcacaagcactgatgtgcaattcattgcagtaactggagaccatgagtgtcttgggagatggaacacttacatcccactccactataacaaggatgggttctggtctcattccattttcctgcctgcagatacagtggtggagtggaagtttgtgttggtagagaatgggggagttacccgctgggaagaatgcagcaatagattcctagaaactggccatgaggataaagtggttcacgcatggtgggggattcactgattcagtttgcaaagtaatggagaagctgtagaacaatgtggaagaggctgaggttgtggaacacactgaataaaataaaggcagtgtgactccaaattcagccatctgaattgtttaaatttgctagtggattttgtctactgtgcagaaatatatatgtctaatgtgcagaaatatatatgtgtgtatgtgtgtatatatatgcacacacacacagataatgcttccagtgaatgtgaacttcttttccctgtggcactgattgacagacttgtgctgatccattattactttagggcttgattctcttggggagtgacttggctaagcttcaggtgtaaactgtggtcacggagcaaaaacattaaccagctgcccagggttcaagcttgagcctttaggtgatctttaaactatggtagtaaaataagcctcactcaaacatagctgacttcctattggtacagcttgaaaagcactttttactacatacacattttatgcttaaaaagttaacatgatacgaaactgtgattagaaaatatctggtctggatgtgattagtaaggatacaagataatgttctaagactgcctaatgctttttgtttgattttcatctgccaggcgttgttatgtgctatgagggtagcaagtacgtctttgtcttaatgatctaaggctggtgtagaaacaaagggcctaatgagaaccaatcatcatggaagtcagttgcgggggcagcccataaggaaagggaaagtgagtggggttgggcataggctgagtgaggtggcctgaatgacacctcttagaggactgtgaagtacaggcacagcccgactgcagggagggatgcacccatcatttacccatgggagcatctgtaggaccatctctctcccacttcttctcccctcccccaccgcatctggccagatggactgtcctacagcaatcgtttccatctgtcaccctcttccctctcctttcataccagtcactatcttgggtaacaaatttatacaggacagtggtacagaaatacatctttgctctgagaatacagcaaatattaacttaaattattataactgaacaaataataaaacctgaattttaatatcttcaaaaaaa

SEQ ID NO: 80 - DNA, 6218 bp, human
agcttcgtcgagaacggaggacaccggcggtccagggtcctgggcagtcgcgccagagctgagcggagggcgcggcgcgagaacgaatctttgtgacattctctctcagcattctttatcccctgtttgctgaagacttcgaccaaagctggtcttagctgttggcattctcctgagaaaaggatagcttcagaaatcagaaaaacatttgggaggtgtctagcccagtggaccttctgaagagcaatgctaagaagacgtttggtttaaagaattaaaaggaagaacaacttaagagcttcttcaaagtttcccgcatgaaaattacttaaacttgcacacaacgtttcacaaaatcttttgtgaaagaagaaaaggaaattcagtgtgtgagtctcagcaggagttaagctaatgcagcttaaaataatgccgaaaaagaagcgcttatctgcgggcagagtgcccctgattctcttcctgtgccagatgattagtgcactggaagtacctcttgatccaaaacttcttgaagacttggtacagcctccaaccatcacccaacagtctccaaaagattacattattgaccctcgggagaatattgtaatccagtgtgaagccaaagggaaaccgcccccaagcttttcctggacccgtaatgggactcattttgacatcgataaagaccctctggtcaccatgaagcctggcacaggaacgctcataattaacatcatgagcgaagggaaagctgagacctatgaaggagtctatcagtgtacagcaaggaacgaacgcggagctgcagtttctaataacattgttgtccgcccatccagatcaccattgtggaccaaagaaaaacttgaaccaatcacacttcaaagtggtcagtctttagtacttccctgcagacccccaattggattaccaccacctataatattttggatggataattcctttcaaagacttccacaaagtgagagagtttctcaaggtttgaatggggacctttatttttccaatgtcctcccagaggacacccgcgaagactatatctgttatgctagatttaatcatactcaaaccatacagcagaagcaacctatttctgtgaaggtgatttcagctaaatcaagtagagagaggccaccaacatttttaactccagaaggcaatgcaagtaacaaagaggaattaagaggaaatgtgctttcactggagtgcattgcagaaggactgcctaccccaattatttactgggcaaaggaagatggaatgctacccaaaaacaggacagtttataagaactttgagaaaaccttgcagatcattcatgtttcagaagcagactctggaaattaccaatgtatagcaaaaaatgcattaggagccatccaccataccatttctgttagagttaaagcggctccatactggatcacagcccctcaaaatcttgtgctgtccccaggagaggatgggaccttgatctgcagagctaatggcaaccccaaacccagaattagctggttaacaaatggagtcccaatagaaattgcccctgatgaccccagcagaaaaatagatggcgataccattattttttcaaatgttcaagaaagatcaagtgcagtctatcagtgcaatgcctctaatgaatatggatatttactggcaaacgcatttgtaaatgtgctggctgagccaccacgaatcctcacacctgcaaacacactctaccaggtcattgcaaacaggcctgctttactagactgtgccttctttgggtctcctctcccaaccatcgagtggtttaaaggagctaaaggaagtgctcttcatgaagatatttatgttttacatgaaaatggaactttggaaattcctgtggcccaaaaggacagtacaggaacttatacgtgtgttgcaaggaataaattagggatggcaaagaatgaagttcacttagaaatcaaagatgctacatggatcgttaaacagcccgaatatgcagttgtgcaaagagggagcatggtgtcctttgaatgcaaagtgaaacatgatcacaccttatccctcactgtcctgtggctgaaggacaacagggaactgcccagtgatgaaaggttcactgttgacaaggatcatctagtggtagctgatgtcagtgacgatgacagcgggacctacacgtgtgtggccaacaccactctggacagcgtctccgccagcgctgtgcttagcgttgttgctcctactccaactccagctcccgtttacgatgtcccaaatcctccctttgacttagaactgacagatcaacttgacaaaagtgttcagctgtcatggaccccaggcgatgacaacaatagccccattacaaaattcatcatcgaatatgaagatgcaatgcacaagccagggctgtggcaccaccaaactgaagtttctggaacacagaccacagcccagctgaacctgtctccttacgtgaactactccttccgcgtgatggcagtgaacagcattgggaagagcttgcccagcgaggcgtctgagcagtatttgacgaaagcctcagaaccagataaaaaccccacagctgtggaaggactgggatcagagcctgataatttggtgattacgtggaagcccttgaatggtttcgaatctaatgggccaggccttcagtacaaagttagctggcgccagaaagatggtgatgatgaatggacatctgtggttgtggcaaatgtatccaaatatattgtctcaggcacgccaacctttgttccatacctgatcaaagttcaggccctgaatgacatggggtttgcccccgagccagctgtagtcatgggacattctggagaagacctcccaatggtggctcctgggaacgtgcgtgtgaatgtggtgaacagtaccttagccgaggtgcactgggacccagtacctctgaaaagcatccgaggacacctacaaggctatcggatttactattggaagacccagagttcatctaaaagaaacagacgtcacattgagaaaaagatcctcaccttccaaggcagcaagactcatggcatgttgccggggctagagccctttagccactacacactgaatgtccgagtggtcaatgggaaaggggagggcccagccagccctgacagagtctttaatactccagaaggagtccccagtgctccctcgtctttgaagattgtgaatccaacactggactctctcactttggaatgggatccaccgagccacccgaatggcattttgacagagtacaccttaaagtatcagccaattaacagcacacatgaattaggccctctggtagatttgaaaattcctgccaacaagacacggtggactttaaaaaatttaaatttcagcactcgatataagttttatttctatgcacaaacatcagcaggatcaggaagtcaaattacagaggaagcagtaacaactgtggatgaagcgatggcaagccggcaggtggatattgcaactcagggctggttcattggtctgatgtgtgctgttgctctccttatcttaattttgctgattgtttgcttcatcagaagaaacaagggtggtaaatatccagttaaagaaaaggaagatgcccatgctgaccctgaaatccagcctatgaaggaagatgatgggacatttggagaatacagtgatgcagaagaccacaagcctttgaaaaaaggaagtcgaactccttcagacaggactgtgaaaaaagaagatagtgacgacagcctagttgactatggagaaggggttaatggccagttcaatgaggatggctcctttattggacaatacagtggtaagaaagagaaagagccggctgaaggaaacgaaagctcagaggcaccttctcctgtcaacgccatgaattcctttgtttaatttttaagctctttgccaatattccatttctctagaatgtttatcctaagcacttgtttgtcagccctctcatactatgaacatatgggtagagagtatattttctgctgtatgttagtattatgagaatagttacagcaaaaacataactcagtcaaatgatatgttaatatgaactggaatgcaaagtgcatactttttcattcaaaatgggtattcttgatttcctcagaactgataaaaaataatgcaacatcaccaacagatcctgttatttcctctgcaggatacagttcaatatgatgcatgaaaaatgctccacatttaaaggacatacccgtgtatgttatgaaaacatggtttgatactttgtttatactaccctcagctgaacccctatatatgaattccgttttcattgtcaagagtgttactgtagtattctctagaacttcaatgtctttgtggacattgttgtgaaattggtgactatgtatagctgtcgttagtctttttgggagactgttaggaacagtttgtacagtatatacttgctaaatgagttcattatgacagtcacattgctgatgcttactgagaactattacctactcttggctcctgttactccgtaggcttcttaatcttccaggcattacagcagcacagtgttctactttttacatcatttctatgttcggttgtttttaggcataaacaatgtgtattgcagtgcatttcggcatttgtgccatactgaaagaatcaaaaacaaatcatccaaattaaatttcaaacattatttcagagaacacagggcaagacacatacagtgccttcagatattaagcattccacaacatcgtgcattctgtatcagctggtccagtccattctgggtcctagattactgtcattgtctaaaagtaacttttaaaaagcagagttcatgaaaactgcaatgctgggaaaagaaggaaacatgaaaataaaaataagacagtttattagaaatagcatttcctcataagcataaaaagaaaatctttgttgccaactgaagcacatgatgattttgtggtcctttatggtttctattacatgcagtaagaaagatgtcaacatgctagaaaattaattttaaaactaagttattccaacactaaaagcatacaacagcatgccaacagtaatatattattctccaagactttacctatgtaagtgttcaaaactctgcagcattaaacaacgtgtatgcaaattgttatggatacatttcagaatctaagaaatcaggcaagtgcttaaaaggccaacggtccaagggattacatctgcagtttaaaaagtaaatatatattctatcgtattcataaacaatatctatcaaatgggttacctccaaatatgaaaatctataacaacctatggttgaaggaatgctcagtttcatttgccaataaattggtttctcataacttgcatcaagtttaattttaagtaaagctttttatatgtagatattttgttgaatttgtaaatacacttaaaatgtagatgctatatgcttataggtgttacatacaaataaacatgcaatgtttatgttgtactgtataagaggtaagctaattaatgcagtgaatgggattggaaagcatctacttaaatatctattgggttcccccctccccccaccttttttgctgtgaaactgaaatagtgaacttttctacgtattgacagcagatttttcgatgaaatcttcagagctttgcctatggggcacagtaggcctagtaacctggcatgtttgatatatgtaggtaaagcataatttaaagtaatcccaggtaaagatggccctaaatactttcatgtctctatattcatttttcacagatccacctgtctcttgaaaatataaaaagacaaaacaggtttgccttggcatcagagagcacaaagattaaaagttactttaaatttgccaatattttgggagaacaataaaactacattttttcctcttccatactggtagatgcgaaatttatctgtgcatgaaagggtcacttctgtaatagtgcaacagatttggtattaaaaattaaatgtggttttaaaagttcctctctcttttgtaatttatgttcccaattgagtgtgaatgtccaagtaatggtgtatgtaatggtacaggcaaatgtgactggatttccctcaaaaaagtaactattaaacagtcttgatctctt

SEQ ID NO: 81 - DNA, 4135 bp, human
ctcacagcccagcacctgcggagggagcgctgaccatggctccctggcctgaattgggagatgcccagcccaaccccgataagtacctcgaaggggccgcaggtcagcagcccactgcccctgataaaagcaaagagaccaacaaaaataacactgaggcacctgtaaccaagattgaacttctgccgtcctactccacggctacactgatagatgagcccactgaggtggatgacccctggaacctacccactcttcaggactcggggatcaagtggtcagagagagacaccaaagggaagattctctgtttcttccaagggattgggagattgattttacttctcggatttctctactttttcgtgtgctccctggatattcttagtagcgccttccagctggttggaggaaaaatggcaggacagttcttcagcaacagctctattatgtccaaccctttgttggggctggtgatcggggtgctggtgaccgtcttggtgcagagctccagcacctcaacgtccatcgttgtcagcatggtgtcctcttcattgctcactgttcgggctgccatccccattatcatgggggccaacattggaacgtcaatcaccaacactattgttgcgctcatgcaggtgggagatcggagtgagttcagaagagcttttgcaggagccactgtccatgacttcttcaactggctgtccctgttggtgctcttgcccgtggaggtggccacccattacctcgagatcataacccagcttatagtggagagcttccacttcaagaatggagaagatgccccagatcttctgaaagtcatcactaagcccttcacaaagctcattgtccagctggataaaaaagttatcagccaaattgcaatgaacgatgaaaaagcgaaaaacaagagtcttgtcaagatttggtgcaaaacttttaccaacaagacccagattaacgtcactgttccctcgactgctaactgcacctccccttccctctgttggacggatggcatccaaaactggaccatgaagaatgtgacctacaaggagaacatcgccaaatgccagcatatctttgtgaatttccacctcccggatcttgctgtgggcaccatcttgctcatactctccctgctggtcctctgtggttgcctgatcatgattgtcaagatcctgggctctgtgctcaaggggcaggtcgccactgtcatcaagaagaccatcaacactgatttcccctttccctttgcatggttgactggctacctggccatcctcgtcggggcaggcatgaccttcatcgtacagagcagctctgtgttcacgtcggccttgacccccctgattggaatcggcgtgataaccattgagagggcttatccactcacgctgggctccaacatcggcaccaccaccaccgccatcctggccgccttagccagccctggcaatgcattgaggagttcactccagatcgccctgtgccactttttcttcaacatctccggcatcttgctgtggtacccgatcccgttcactcgcctgcccatccgcatggccaaggggctgggcaacatctctgccaagtatcgctggttcgccgtcttctacctgatcatcttcttcttcctgatcccgctgacggtgtttggcctctcgctggccggctggcgggtgctggttggtgtcggggttcccgtcgtcttcatcatcatcctggtactgtgcctccgactcctgcagtctcgctgcccacgcgtcctgccgaagaaactccagaactggaacttcctgccgctgtggatgcgctcgctgaagccctgggatgccgtcgtctccaagttcaccggctgcttccagatgcgctgctgctgctgctgccgcgtgtgctgccgcgcgtgctgcttgctgtgtggctgccccaagtgctgccgctgcagcaagtgctgcgaggacttggaggaggcgcaggaggggcaggatgtccctgtcaaggctcctgagacctttgataacataaccattagcagagaggctcagggtgaggtccctgcctcggactcaaagaccgaatgcacggccttgtaggggacgccccagattgtcagggatggggggatggtccttgagttttgcatgctctcctccctcccacttctgcaccctttcaccacctcgaggagatttgctccccattagcgaatgaaattgatgcagtcctacctaactcgattccctttggcttggtgggtaggcctgcagggcacttttattccaacccctggtcactcagtaatcttttactccaggaaggcacaggatggtacctaaagagaattagagaatgaacctggcgggacggatgtctaatcctgcacctagctgggttggtcagtagaacctattttcagactcaaaaaccatcttcagaaagaaaaggcccagggaaggaatgtatgagaggctctcccagatgaggaagtgtactctctatgactatcaagctcaggcctctccctttttttaaaccaaagtctggcaaccaagagcagcagctccatggcctccttgccccagatcagcctgggtcaggggacatagtgtcattgtttggaaactgcagaccacaaggtgtgggtctatcccacttcctagtgctccccacattccccatcagggcttcctcacgtggacaggtgtgctagtccaggcagttcacttgcagtttccttgtcctcatgcttcggggatgggagccacgcctgaactagagttcaggctggatacatgtgctcacctgctgctcttgtcttcctaagagacagagagtggggcagatggaggagaagaaagtgaggaatgagtagcatagcattctgccaaaagggccccagattcttaatttagcaaactaagaagcccaattcaaaagcattgtggctaaagtctaacgctcctctcttggtcagataacaaaagccctccctgttggatcttttgaaataaaacgtgcaagttatccaggctcgtagcctgcatgctgccaccttgaatcccagggagtatctgcacctggaatagctctccacccctctctgcctccttactttctgtgcaagatgatttcctgggttaacttccttctttccatccacccacccactggaatctctttccaaacatttttccattttcccacagatgggctttgattagctgtcctctctccatgcctgcaaagctccagatttttggggaaagctgtacccaactggactgcccagtgaactgggatcattgagtacagtcgagcacacgtgtgtgcatgggtcaaaggggtgtgttccttctcatcctagatgccttctctgtgccttccacagcctcctgcctgattacaccactgcccccgccccaccctcagccatcccaattcttcctggccagtgcgctccagccttatctaggaaaggaggagtgggtgtagccgtgcagcaagattggggcctcccccatcccagcttctccaccatcccagcaagtcaggatatcagacagtcctcccctgaccctcccccttgtagatatcaattcccaaacagagccaaatactctatatctatagtcacagccctgtacagcatttttcataagttatatagtaaatggtctgcatgatttgtgcttctagtgctctcatttggaaatgaggcaggcttcttctatgaaatgtaaagaaagaaaccactttgtatattttgtaataccacctctgtggccatgcctgccccgcccactctgtatatatgtaagttaaacccgggcaggggctgtggccgtctttgtactctggtgatttttaaaaattgaatctttgtacttgcattgattgtataataattttgagaccaggtctcgctgtgttgctcaggctggtctcaaactcctgagatcaagcaatccgcccacctcagcctcccaaagtgctgagatcacaggcgtgagccaccaccaggcctgattgtaatttttttttttttttttactggttatgggaagggagaaataaaatcatcaaaccccaaaaaaaaaaaaaaaaaaaaaaaaaaaaaaaaaaa

SEQ ID NO: 82 - DNA, 1081 bp, human
cactaggaggtggcggtggatcttactccttccagccagtgaggatccagcaacctgctccgtgcctcccgcgcctgttggttggaagtgacgaccttgaagatcggccggttggaagtgacgaccttgaagatcggcgggcgcagcggggccgagggggcgggtctggcgctaggtccagcccctgcgtgccgggaaccccagaggaggtcgcagttcagcccagctgaggcctgtctgcagaatcgacaccaaccagcatcatgtccatgacactggggtactgggacatccgcgggctggcccacgccatccgcctgctcctggaatacacagactcaagctacgaggaaaagaagtatacgatgggggacgctcctgactatgacagaagccagtggctgaatgaaaaattcaagctgggcctagactttcccaatctgccctacttgattgatggggctcacaagatcacccagagcaacgccatcctgtgctacattgcccgcaagcacaacctgtgtggggagacagaagaggagaagattcgtgtggacattttggagaaccaggctatggacgtctccaatcagctggccagagtctgctacagccctgactttgagaaactgaagccagaatacttggaggaacttcctacaatgatgcagcacttctcacagttcctggggaagaggccatggtttgttggagacaagatcacctttgtagatttcctcgcctatgatgtccttgacctccaccgtatatttgagcccaactgcttggacgcctttccaaatctgaaggacttcatctcccgctttgagggcttggagaagatctctgcctacatgaagtccagccgcttcctcccaaaacctctgtacacaagggtggctgtctggggcaacaagtaatgccttgaaggccaggaggtgggagtgaggagcccatactcagcctgctgcccaggctgtgcagcgcagctggactctgcatcccagcacctgcctcctcgttcctttctcctgtttattcccatctttacccccaagactttattgggcctcttcacttc

SEQ ID NO: 83 - DNA, 739 bp, human
gcggccgcccagcttgcactcaatgatatagcccatggtgcagtcatcaggcagccggatgagagcagatgtgtccatgaaacgggagccactggcccacggagccatcttcaaagccagtttgcgattgatgcagaagccagcacccccagtggcaaaccagaactgtaccagcctcgtgcggttgtggggctgtggctctgaggcatggatgggccggttcaggctgggccttcccacatagacgtcgcgggccagcgggaaggctctcagaagctgcagcagcgcccttgggttcacatagttgtcatcgtccacatggcagaaccacctaagcccactggccaagaaggtgtcgaactcagcagccatcttgcaggacagagctgggtggctgtgttccgcggagcagttggtgaccacaaggtgggaccccagtctctcctggaggcctttgtctgggctgtcggtgaagacaaatgtctgttccctggtcctggaaacccacgtgtcaagcagcagctccaggcgcaagcggtggaaagccccggtcgtcttcactgcaatgaagacatcgtgtagctgtagcttaggggggccccggttctgctggctcagcttccgggtcccttgtacccgctgcggggacagggtcaagtggtaccgcagacacaggagccccatgcacaaggaggggtgaggaggctccagcctagccccgcgggaacccgcactgcat

SEQ ID NO: 84 - DNA, 1556 bp, human
cggtcagatttgtgtgtgcaccgcgtctccagcgatcccggatccactgcgctgccaggggcctgggggtgggtctcttgctgtctctgcgacgacatccttacgtttcggcactctaatgctgggtttgtgcgtgtgtgtctgcttagcggtctagcgggctgttaggctccctcgcccccagctccttggctcgctcagctcctccaccgcagcccagcagtgagacgcgcgcgcagccagctccccacgagatggaacagaccgaagtgctgaagccacggaccctggctgatctgatccgcatcctgcaccagctctttgccggcgatgaggtcaatgtagaggaggtgcaggccatcatggaagcctacgagagcgaccccatcgagtgggcaatgtacgccaagttcgaccagtacaggtatacccgaaatcttgtggatcaaggaaatggaaaatttaatctgatgattctctgttggggtgaaggacatggcagcagtattcatgatcataccaactcccactgctttctgaagatgctacagggaaatctaaaggagacattatttgcctggcctgacaaaaaatccaatgagatggtcaagaagtctgaaagagtcttgagggaaaaccagtgtgcctacatcaatgattccattggcttacatcgagtagagaacatcagccatacggaacctgctgtgagccttcacttgtacagtccaccttttgatacatgccatgcctttgatcaaagaacaggacataaaaacaaagtcacaatgacattccatagtaaatttggaatcagaactccaaatgcaacttcgggctcgctggagaacaactaaggggcaccaaaccctctgaggttttactttaaggttcgctgtatgtttgccttggacaaaaaggctacctaccacgtgctatccagtaatatacttaaataagccaatacttagatctactgtaaggcagatgctaattataaggcattaagtaagcaaatagtgccctcagctactgcagaagaaaagtcccactgaggaaaagaaagtcttgtgatttttaaaggcaagttttcaagtgctctcatagttctatcctctaattccattaaatccatactaggagcgtcagtgagggttttcatagcttttggaaatactttggtctctgaactgtaattagcaagaagtaaaaacagaaacgtcaaacgtcaaatgtttgctttgttacctggaggactaaatgtagatgtctttagtatactttgtatgttcttaaatattggaagataattttgtgaatctgtagattttattttttcagtcttaccttacaaatttcttttctatgaataatagaggaactcacggcactctgccacttgttaatgaaaggaagtgcagaggatttagaaaagtacatgatccccagaccacaacaaaccaaaacataaactcatgtctgtgtcccatggtcatagtcaaagattttgtactgctaaaattaccaaataatttaaataaagtggatttgaacac

SEQ ID NO: 85 - DNA, 1127 bp, human
accaaatcaaccataggtccaagaacaattgtctctggacggcagctatgcgactcaccgtgctgtgtgctgtgtgcctgctgcctggcagcctggccctgccgctgcctcaggaggcgggaggcatgagtgagctacagtgggaacaggctcaggactatctcaagagattttatctctatgactcagaaacaaaaaatgccaacagtttagaagccaaactcaaggagatgcaaaaattctttggcctacctataactggaatgttaaactcccgcgtcatagaaataatgcagaagcccagatgtggagtgccagatgttgcagaatactcactatttccaaatagcccaaaatggacttccaaagtggtcacctacaggatcgtatcatatactcgagacttaccgcatattacagtggatcgattagtgtcaaaggctttaaacatgtggggcaaagagatccccctgcatttcaggaaagttgtatggggaactgctgacatcatgattggctttgcgcgaggagctcatggggactcctacccatttgatgggccaggaaacacgctggctcatgcctttgcgcctgggacaggtctcggaggagatgctcacttcgatgaggatgaacgctggacggatggtagcagtctagggattaacttcctgtatgctgcaactcatgaacttggccattctttgggtatgggacattcctctgatcctaatgcagtgatgtatccaacctatggaaatggagatccccaaaattttaaactttcccaggatgatattaaaggcattcagaaactatatggaaagagaagtaattcaagaaagaaatagaaacttcaggcagaacatccattcattcattcattggattgtatatcattgttgcacaatcagaattgataagcactgttcctccactccatttagcaattatgtcacccttttttattgcagttggtttttgaatgtctttcactccttttattggttaaactcctttatggtgtgactgtgtcttattccatctatgagctttgtcagtgcgcgtagatgtcaataaatgttacatacacaaataaataaaatgtttattccatggtaaattta

SEQ ID NO: 86 - DNA, 2454 bp, human
ccaggaggcacgctggttttccggggccgctccatcgcgccttcctcctgcgcctcgcttctccggtccagccgccatcttcctttccgcacaggggccgccgagcggggccatgcagccaacgctgcttctcagcctcctgggagccgtggggctggcggctgtcaattccatgccagtggataacaggaaccacaatgaaggaatggtgactcgctgcatcattgaggtcctctcaaatgccttgtcgaagtccagcgctccacccatcacccctgagtgccgccaagtcctgaagacgagtagaaaagacgtcaaagacaaagagacaactgaaaatgaaaacacaaagtttgaagtaagattgttaagagacccagctgatgcctcggaagcccacgagtcctccagcaggggagaggcaggagccccaggggaggaggacatccaaggcccaacaaaggcagacacagagaaatgggcagagggaggcgggcacagccgagagcgagcggatgagccccagtggagcctctatccctccgacagccaagtctctgaagaagtgaagacacgccattctgagaagagccagagagaggatgaggaggaggaggagggagagaactatcaaaaaggggagcgaggggaagatagcagtgaagagaaacaccttgaagagccaggagagacacaaaacgcttttctcaatgaaagaaagcaggcttcagctataaaaaaagaggagttagtggccagatcggaaacacatgctgccgggcattctcaggagaagacacatagccgagagaagagtagccaggagagtggagaggaggcagggagccaggagaatcacccccaggagtctaaaggccaaccccgaagccaggaagaatctgaggaaggtgaggaagatgccacctctgaggtggacaaacgacgcacgaggcccagacaccaccacgggaggagcaggcccgacaggtcctctcaaggagggagtcttccctctgaggaaaagggacacccccaggaggaatctgaggagtcaaacgtcagcatggccagtttaggggaaaagagggaccaccattcaacccactacagggcttcagaggaagaacctgaatatggagaagaaataaagggttatccaggcgtccaggcccctgaggacctggagtgggagcgctataggggcagaggaagtgaagaatacagggctccaagacctcagagtgaggagagttgggatgaggaggacaagagaaactaccccagcttagagcttgataagatggcacatggatatggtgaagaaagtgaggaagagaggggccttgagccgggaaagggacgccatcacagaggcaggggaggggagccacgtgcctatttcatgtctgacaccagagaagagaaaaggttcttgggtgaaggacaccaccgtgtccaagaaaaccagatggacaaggcaaggaggcatccacaaggtgcgtggaaagagctggacagaaattatctcaactacggtgaggaaggagccccagggaagtggcagcagcagggagacctgcaggacactaaagaaaacagggaggaagctaggtttcaagataaacaatatagctcccatcacacagctgaaaagaggaagagattaggggaactgttcaacccatactacgaccctctccagtggaagagcagccattttgaaagaagagacaacatgaatgacaattttctcgagggtgaggaggaaaatgagctgaccttgaacgagaagaatttcttcccagaatacaactatgactggtgggagaaaaagcccttctctgaggatgtgaactgggggtatgagaagagaaacctcgccagggtccccaagctggacctgaaaaggcaatatgacagggtggcccaactggaccagctccttcactacaggaagaagtcagctgagtttccagacttctatgattctgaggagccggtgagcacccaccaggaggcagaaaatgaaaaggacagggctgaccagacagtcctgacagaggacgagaaaaaagaactcgaaaacttggctgcaatggatttggaactacagaagatagctgagaaattcagccaaaggggctgactgtcattggagcggtgggcactgttaagaagcagccatcacatgatctgtttttcaccacttcactgaaagacaccatttatatacccaagggcagaaagtagaacttactattcattaaatgtttgacacaattggaattgtctttaatttctgtcagaatgctattgaaaatgtgaattgcatgacttgtagcatattcttttctgcaaaatagacatattaacatgcttatgacaatgactgtgctactgtctttggaaaaatgtttgtctcagttggaaataataaaagattcacctgagacc

SEQ ID NO: 87 - DNA, 428 bp, human
ctgggtctgtctctgccacctggtctgccacagatccatgatgtgcagttctctggagcaggcgctggctgtgctggtcactaccttccacaagtactcctgccaagagggcgacaagttcaagctgagtaagggggaaatgaaggaacttctgcacaaggagctgcccagctttgtgggggagaaagtggatgaggaggggctgaagaagctgatgggcagcctggatgagaacagtgaccagcaggtggacttccaggagtatgctgttttcctggcactcatcactgtcatgtgcaatgacttcttccagggctgcccagaccgaccctgaagcagaactcttgacttcctgccatggatctcttgggcccaggactgttgatgcctttgagttttgtattcaataaactttttttgtctgttga

SEQ ID NO: 88 - DNA, 4114 bp, human
tccttttattgtggatgaacaccacgtacatgccgtaaatgctccctaggctggctgcggctacaaggcagacccgggagctgagaatagaggaatacctgcccaagcaactcattctgcacagcagccgacaagatagcgattttcctgtgctggaatgtgcccatccaaagacacttggattggacttaatcttaaacctctggagttcaagaccttttaaaaagggctaaataaacaatctctacatgtaaaaggccactgactcctacttcctctgtatagagcaactgttgaactcagctgcctgtagggcgtgattctcagtcaccagactcagcttggagatcttacaatgatggcaatcaggagacactgaacggagatgctacatattcctctcttgcagcaaaaggttttagaagcgttcgaccaaacctacaagataaaagatcaccaactcagagccagataacagtgaatggaaactcaggaggtgccgtgagtcccatgagttactatcagaggccgttttccccctcggcatattctctcccagcctcactcaactccagcattgtcatgcagcacggcacatccctcgattccacagacacatatccccagcatgcgcagtctctggatggcaccaccagcagctctatccccctgtaccgatcctcagaggaagagaagagagtgacagtcatcaaagccccgcattacccagggatcgggcccgtggatgaatccggaatccccacagcaattagaacgacagtcgaccggcccaaggactggtacaagacgatgtttaagcaaattcacatggtgcacaagccggatgatgacacagacatgtataatactccttatacatacaatgcaggtctgtacaacccaccctacagtgctcagtcacaccctgctgcaaagacccaaacctacagacctctttccaaaagccactccgacaacagccccaatgcctttaaggatgcgtcctccccagtgcctcccccacatgttccacctccagtcccgccgcttcgaccaagagatcggtcttcaacagaaaagcatgactgggatcctccagacagaaaagtggacacaagaaaatttcggtctgagccaaggagtatttttgaatatgaacctggcaagtcatcaattcttcagcatgaaagaccagcctccttgtatcagtcctctatagacagaagcctggaaagacccatgagttctgcaagcatggccagtgacttcaggaagcggaggaagagcgagcctgcagtgggtccaccacggggcttgggagatcaaagtgcgagcaggactagcccaggccgagtggacctcccaggatcaagcaccactcttacaaagtctttcactagctcttctccttcttccccatcaagagcaaaaggtggggatgatagcaaaatatgtccatccctttgcagttactcagggctcaacggcaacccctccagtgagttagattactgtagcacttacagacagcacttggatgtccctcgggactcaccaagagccattagtttcaagaacggctggcaaatggcccggcaaaacgcagaaatctggagcagcacggaagaaaccgtctctcccaaaatcaaatcccggagctgtgacgatctcctaaacgacgactgcgatagcttcccggacccgaaagtcaagtcggaaagcatgggctccctgttatgtgaggaggactccaaggagagctgccccatggcgtgggggtccccctacgtcccggaggttcgcagtaacggcagatcaaggatcagacacaggtcagcccgcaacgccccggggttcctgaagatgtacaagaaaatgcaccgcatcaaccgcaaggacctgatgaactccgaggtgatctgctccgtgaagtccaggattctgcagtacgagagcgagcagcagcacaaggacctgctgcgcgcctggagccagtgctccacggaggaggtgccccgggacatggtgcccacacgcatctccgaattcgaaaagctgatccagaagtccaaatccatgccaaatttaggggatgacatgctgtctcccgtaaccctagaaccaccgcaaaatggcctatgtcccaagaggcggttttccattgagtatttgctggaggaagaaaatcaaagcggcccccccgctcggggccggcgaggctgccagtctaacgccctggtgcccattcacattgaagtcaccagcgatgagcagccccgagcacacgtggagttttccgacagcgaccaggacggggttgtgtccgaccacagtgactacattcacctagaggggtcatccttctgcagtgaaagtgactttgatcacttttccttcacatcctccgaaagcttttacggatccagccaccaccaccaccatcaccaccaccaccaccaccgccacctcatcagctcctgcaaaggcaggtgcccggcctcctacactcgatttaccacaatgttaaaacacgaaagagccagacacgaaaacaccgaggagcccagaaggcaagaaatggaccctggcctttctaaacttgcttttctagtcagtcctgtgcctttccggaggaaaaaaaattcggctcctaagaaacagactgaaaaggcaaaatgtaaagcatctgtgtttgaggctctggactctgcccttaaagacatctgtgaccaaattaaagctgaaaagaaaagggggagcttgccggacaacagcatcctgcaccgcctcatcagtgagctgctgccagatgttcccgagaggaactcatccctgagagcgctgaggaggagccccctgcaccagcctctccacccactgcctcccgatggtgctattcattgtccaccctaccagaatgactgcggaagaatgccccgcagtgcctctttccaagacgtggacacagccaacagcagctgccaccaccaagaccgtggcggtgcactccaagaccgtgagtcccctagaagttactcatccactttgactgacatggggagaagtgcaccaagggaaagaagaggaactccagaaaaagagaaattgcctgcaaaagctgtttatgattttaaggctcagacatctaaggagttgtcatttaagaaaggagatactgtctacatcctcaggaaaattgatcaaaattggtatgagggagaacaccacgggagagtgggcatcttcccgatctcatacgtagagaaactcacacctcctgagaaagcacagcctgcaagaccacctccgccagcccagcccggagaaatcggagaagctatagccaaatacaacttcaacgcagacacaaatgtggagctgtcactgagaaagggagatagagttattcttcttaaaagagttgatcaaaactggtatgaaggtaaaatcccaggaaccaacagacaaggcatcttccctgtttcctatgtggaggtcgtcaagaagaacacaaaaggtgctgaggactaccctgaccctccaataccccacagctattctagtgataggattcacagcttgagctcaaataagccacagcgtcctgtgtttactcatgaaaatattcaaggtgggggggaaccgtttcaggctctgtataactatactcccaggaatgaagatgagctggagctcagagaaagtgatgtcattgatgtcatggaaaagtgtgatgacggctggtttgtggggacctcaagaagaaccaaattctttggtactttccccggaaactacgtcaagaggctgtgaattgcgctccctccttctgtagaggccgcctgccagccatgcacctgcgtcaacgcgcctgaaacaccccgcgggcctcccgttgtcatgccttacggtttccaatgcgccgtcaccatctccacctcccaccaaaccaccagcagagtagccgccgctgctgtgagcctggggacgacatggcaggctggtccccctccgtgaaagtgtggattcctacttcctgctctaagctttgacacgtcaaaatgtgggatcagaaagaaaaaaatcatgatatttaaaaatggtcaaatatttg

SEQ ID NO: 89 - DNA, 1780 bp, human
gggccaggactgagaaaggggaaagggaagggtgccacgtccgagcagccgccttgactggggaagggtctgaatcccacccttggcattgcttggtggagactgagatacccgtgctccgctcgcctccttggttgaagatttctccttccctcacgtgatttgagccccgtttttattttctgtgagccacgtcctcctcgagcggggtcaatctggcaaaaggagtgatgcgcttcgcctggaccgtgctcctgctcgggcctttgcagctctgcgcgctagtgcactgcgcccctcccgccgccggccaacagcagcccccgcgcgagccgccggcggctccgggcgcctggcgccagcagatccaatgggagaacaacgggcaggtgttcagcttgctgagcctgggctcacagtaccagcctcagcgccgccgggacccgggcgccgccgtccctggtgcagccaacgcctccgcccagcagccccgcactccgatcctgctgatccgcgacaaccgcaccgccgcggggcgaacgcggacggccggctcatctggagtcaccgctggccgccccaggcccaccgcccgtcactggttccaagctggctactcgacatctagagcccgcgaagctgggccctcgcgcgcggagaaccagacagcgccgggagaagttcctgctctcagtaacctgcggccgcccagccgcgtggacggcatggtgggcgacgacccttacaacccctacaagtactctgacgacaacccttattacaactactacgatacttatgaaaggcccagacctgggggcaggtaccggcccggatacggcactggctacttccagtacggtctcccagacctggtggccgacccctactacatccaggcgtccacgtacgtgcagaagatgtccatgtacaacctgagatgcgcggcggaggaaaactgtctggccagtacagcatacagggcagatgtcagagattatgatcacagggtgctgctcagatttccccaaagagtgaaaaaccaagggacatcagatttcttacccagccgaccaagatattcctgggaatggcacagttgtcatcaacattaccacagtatggatgagtttagccacttgtacctgcttgatgccaacacccagaggagatgggctgaaggccacaaagcaagtttctgtcttgaagacacatcctgtgactatggctaccacaggcgatttgcatgtactgcacacacacagggattgagtcctggctgttatgatacctatggtgcagacatagactgccagtggattgatattacagatgtaaaacctggaaactatatcctaaaggtcagtgtaaaccccagctacctggttcctgaatctgactataccaacaatgttgtgcgctgtgacattcgctacacaggacatcatgcgtatgcctcaggctgcacaatttcaccgtattagaaggcaaagcaaaactcccaatggataaatcagtgcctggtgttctgaagtgggaaaaaatagactaacttcagtaggatttatgtattttgaaaaagagaacagaaaacaacaaaagaatttttgtttggactgttttcaataacaaagcacataactggattttgaacgcttaagtcatcattacttgggaaatttttaatgtttattatttacatcactttgtgaattaacacagtgtttcaattctgtaattacatatttgactctttcaaaaaaaaaaaaaaaaaaaaaaa

SEQ ID NO: 90 - DNA, 970 bp, human
aaaaaaawwwacwtctcattcarcgtgaccttccaracctattartaaramagcagtatgtgagttcagawacaatctgaaagtmatgamaatwawaawagggcaaraccaawaaagttamamatttgaagtcaacwaragamaaaattgtggaactgtgtataamaraaaatgacactgatgaggaactccagggatattaagggcaaaattgccarararamaaraagggtacaattagaaaacctgcatctttaawacagtgagatttgtatgcatacacyctggtgtcttcattttgcagcccattatattggcttaaaagccagaaaggtgcccatgcatgtaatttawactggagcaacgaatgcagtgtatgtggacgcgtgtgtgtgcactttgaaaggcagtagttttagaagaatgagaagaaaattacttccygggcattcawtaawaattcaggggatatcctgtacccccatttaaaaaacaatataataataataacacgtacaaaataacatcataaataacataaatgagaagttttcaagtatttcaatgtgccttgaaaagtttcaaacagtaattctcacaattggttagacaatcatttttttttcttttcttttcctctcatttagtctcagagcctaaaaagaaatgcctccagtctcygttagccccgatgtttggaatgaaattaacaagattctaccttaaaagagaaaacttatgtgggsttttcaaattgtgaaaatttgttccctcttataaaatataatctttcccctgctgstgggtttataaatatggggatatagcccagagccattataaagawaaahcaacmaccacaatawactaaggggctcatctgatggctaaggtctcaggaaawawkagaagasaccttgatmaggaaaggaaaarggtaggggtaawacvkcaccttcactcchtgccc

SEQ ID NO: 91 - DNA, 417 bp, human
acctcccaaccaagccctccagcaaggattcaggagtgcccctcgggcctcgccatgaggctcttcctgtcgctcccggtcctggtggtggttctgtcgatcgtcttggaaggcccagccccagcccaggggaccccagacgtctccagtgccttggataagctgaaggagtttggaaacacactggaggacaaggctcgggaactcatcagccgcatcaaacagagtgaactttctgccaagatgcgggagtggttttcagagacatttcagaaagtgaaggagaaactcaagattgactcatgaggacctgaagggtgacatccaggaggggcctctgaaatttcccacaccccagcgcctgtgctgaggactcccgccatgtggccccaggtgccaccaataaaaatcctaccg

SEQ ID NO: 92 - DNA, 2838 bp, human
gtgcaccccaggttcgctgatctatcaacatcaccccattaagaatacaaagcactacattcttttatcttttttgctccacatgtacataagaattgacacaggaacctactgaatagcgtagatataggaaggcaggatggttatatggaataaaaggcggactgcatctgtatgtagtgaaattgccccagttcagagttgaatgtttattattaaagaaaaaagtaatgtacatatggctggatttttttgcttgctattcgtttttgtgtcacttggcatgagatgtttattttggactattgtatataatgtattgtaatatttgaagcacaaatgtaatacagttttattgtgttaccatttgtgttccatttgcttctttgtattgttgcatttagtacaatcagtgtttaaacttactgtatatttatgctttctgtatttaccagctattttaaatgagctgtaactttctagtaaagaattgaaaagcaaatctcactaatgatacacagatagataaagcaagtctatcaacattaaaaatactaaaaaataaagacacacacagagcattttagtgacatccactacttattgccgctatgagttagagtctatcagtgttcttgttataaccccctattttcagggggttaaaaatcagctttaaaaaaatacataaaaatttcatcttaaagcactttcattttataccaacgtgaaaagtgccatttttagaataactttaaagcttaacaggtttccttttaatatcctttttttgtgtgctctttacttacacaatggctttgttttgctttttcagccacaccccttatgtgaactagtgcctttgggtatcacgtaaaattttttccaaagggttactttaaaaatctgttaccacaattatgagatgatttttaagtgataaattaaacttcttcttgtataaattctgcccagatctctccacaagagctgagggtttcataactttatggcttaataaatgtatgacactgaaaagatttgagtgtgaatctactgaaatcactataatgcacattgaagctatgatggtatttgagtagtgaggttacttttgatcggagcaacataatgctcatagaatcttctagaagaagagaaacaaagggattgataaaatgctgagaactagtgattatatatttttctgtatttacctgacatttattttaatgttcaaaaagtaaacactttaagtttgatgtgttttactctctcattgttttaagtaattgccaactcagaatacatcattcttaggctgaaatttgtctttccattttttaaggtgaaatagtactaccttacgtgatagcatacaaagaagaaagctctagaaagagaaattatggagaatgattatttaaattacaattaaggaaatgagaatatgatcccctcttccgagttgcccacaaacttgcttctttgcttttgctccctgtaatagaactacttttcaacaaatctaattttgcacggcaccgttaaccatattttcactacagcaaacttagtgctatgggttttctttttctttgtttttttcttgatcacttgtataggaaacaatattttccagtgttatttgcatatatattttgtccttccaatatatgcattacagatgaaaattaaatgttatacctgaattcttgggttggggccaaaatattaagctgaaaataatgctggtgtggatttgttttaaaacaaagctttattatgaacatgcatgtgaatctggatattgcctcttatttttaagaaaatggttctgtgaaaagtgaatgatatgtatttttccaaatgcttcatggttaggagtcttcaagttccatgttccccagatttgagatatactaaagaaagaaattcaaaagtagctatttggggcccacaaaaataactattattttagccttagagccttacacttgtttcatgaagagaaaggacttgcataaccaaaataaacaaagcaagacaaattaaaaatatgtgggggagagatcagtgaaaagtggttttcttaatgcagccctgctggtccccattaacaattgcttgaaattcacatggatgtaaaattataattgtcaggatcttattcagatgatcttttaaggtttaactggttttgcttttgtttatctatatgtcaaaatacttgtaaattgggaacaaacttctctcagcttcttgaagttgttcaactatccttgccactggaagaccaaacaaggttttcactgctttttcttttacataatatgctgagaattatttcttatgctttttactacaaacaaaattactcacctggattaaagattaaggccttaatctgtttagattatctttaatctccatgaaatcgtgaaataagacaagaatagtgtttcagctgtaggccattttacagctaattgcccataaattgtagcatttattgacctgaagtactaagctaattgtcttgactactcaaagcccctgaattgttgtcaactttcccctttgtgttgtgtagccctaacgtcatttagcttgttgtctgatgcctccagtaggacacctccgatggagctttgatttctgagcagcgaaagctcccttcctaagatgcatctcgcataggctgcctatgatgaaggaccgtgcacctccactccaacagagtgctgagtttaaaagttgacctgtgtttgtaatttcactttcatcttgcttaataaatatctgctggattctttcattcaaaaaaaaaaaaaaaaa

SEQ ID NO: 93 - DNA, 2603 bp, human
cccgggtactggtctcagtacccctgcagccggccggagaggctagagcccgacggggcccggctccggcggcagccgcgcctctcgcttgcttccctcggccgggccgtcctcggcggcagtgtcaggagcactccgctggtccaggcggcaacatgtccatgcttttagtgatgtccctgcctctaatccagaagccatggaggagataaggtagcccccctcgatcggatggggaagcccagttcaatggatactaaattcaaggatgacttatttcggaagtacgtgcagttccatgagagcaaagtggataccaccaccagcaggcagcggcctggcagcgatgagtgcctgcgggtggcagcctcaaccctgctcagcctgcacaaggtggatcccttttatcgattccggctgatccagttctatgaggtggtggagagctccttgcgctcgctcagctcctctagcctgcgggctctgcacggcgccttcagcatgctggagacggtgggcatcaacctcttcctctacccgtggaagaaggaattcagaagcatcaagacctacacgggcccttttgtttattatgtcaagtcgacattactggaagaggacatccgagccatcctgagctgcatgggctacacacctgagctgggcactgcatacaagctcagagagctcgtggagaccctccaggtgaagatggtctcctttgagctctttctggccaaagtcgattgtgagcagatgctagaaatccactcacaagtgaaggacaagggctactccgagctggacattgtgagcgagcgcaagagcagtgcagaggatgtgcgcggctgctcggacgccctgcggcggcgggcagagggccgggagcacctgacggcctccatgtcacgagtggcactccagaagtcggccagcgagcgggcggccaaggactactacaagccccgcgtgaccaagccctcgaggtcagtggatgcctatgacagctactgggagagccggaagccacccctgaaggcctcattgagtcttcggaaggagcctgtggcaacggatgtgggggacgacctcaaggatgagatcatccgcccatccccttcgctgctgaccatggccagctccccccacggcagcccggatgtgcttccacccgcctcccccagcaacggcccggccctgctgcgcggtacctacttctccactcaggatgacgtggatctgtacacagactctgaacccagggccacctaccgtcggcaggatgctctgcggccggatgtgtggctgctcagaaacgatgcccactccctctaccacaagcgctcgccccctgccaaagagtctgccctctccaagtgccaaagctgcgggctgtcctgcagctcctccctctgccagcgctgtgacagcctgctcacctgtcctccagcttccaagcccagcgccttccccagcaaggcctcgactcatgacagcctggcccacggggcatctctgcgggagaagtacccaggccagactcagggcctcgaccgcctcccgcaccttcactccaaatccaagccctccaccacgcccacttcccgctgtggcttctgtaaccgcccaggcgccaccaacacctgcacccagtgttcaaaagtctcatgtgacgcctgcctcagcgcttaccattatgacccctgctacaaaaagagtgagctgcacaagttcatgcccaacaaccagctgaactacaagtccacccagctctcccatctcgtgtacagatagaccggcctcgccccttccagctccaagggctacatcaaccgacctttcgggtttcacggtgaagaagtactaacgcattgatctcagaggcggaggctgcacttgaccatgtaggtggcagagatcgtgggctggctgtgtccacgtgggagttcacttagcgactcagatatctcaaccaatggctgctttgttgtctgacaagggagaaggtggcacttccgttcagattcattttgctaatctctccactccctgttcagttggttctttttttggggttttgttttgttttgttttgttgttttgttttttcctttaaagaggatttctgtctctgggaccctcgctgcacctacccctcccattgcaaagccaacttggactgggaagggcccttcaggtcaccaaacatccacctggagcggcgagctagaggcctgttggcttgtgaaatgagccctcctgccacacggggcctctcccaaaggctcatcccttggccgcccccttcctaaacacaaggatccccagctggactccccaccccctggcttccccacctctccaggtgtcaaaggtgaaccgagtccagtattagctgaatgtcatttcgtacaccacagctcagtcagcccatggccttcgtgaactttgctccaacacactgatgtgtgggcttcccacagcaggactgacttccccctttctgttgtttgcacatgcccctcttactgtactgtcaatagatatttttgagatttatttttaaataaatattcaacttgcaaaaaaaaaaaaaaaaaaaa

SEQ ID NO: 94 - DNA, 5054 bp, human
atgggagacgtaaaagcgttgctgtttgtcgttgctgcccgggccagacgtttaggaggagccgctgcatccgagtccctggctgtctccgaagccttctgcagggtccgaagctgccagcccaaaaagtgtgcaggcccccagcggtgcctgaacccagtgcctgcagtgcccagtcccagccccagcgtgaggaagagacaggtgtccctcaactggcagccactgacgctccaggaggccagagctctactgaagcggcggcggccccgggggccagggggccggggactactgagaaggaggcccccacagcgtgcccccgctggcaaggccccggtcctgtgtcccttgatctgtcacaatggcggtgtgtgcgtgaagcctgaccgctgcttctgtcccccggacttcgctggcaagttctgccagttgcactcctcgggcgcccggcccccggccccggctgtaccaggcctcacccgctccgtgtacactatgccactggccaaccaccgcgacgacgagcacggcgtggcatctatggtgagcgtccacgtggagcacccgcaggaggcgtcggtggtggtgcaccaggtggagcgtgtgtctggcccttgggaggaggcggacgctgaggcggtggcgcgggcggaagcggcggcgcgggcggaggcggcagcgccctacacggtgttggcacagagcgcgccgcgggaggacggctactcagatgcctcgggcttcggttactgctttcgggagctgcgcggaggcgaatgcgcgtccccgctgcccgggctccggacgcaggaggtctgctgccgaggggccggcttggcctggggcgttcacgactgtcagctgtgctccgagcgcctggggaactccgaaagagtgagcgccccagatggaccttgtccaaccggctttgaaagagttaatgggtcctgcgaagatgtggatgagtgcgcgactggcgggcgctgccagcacggcgagtgtgcaaacacgcgcggcgggtacacgtgtgtgtgccccgacggctttctgctcgactcgtcccgcagcagctgcatctcccaacacgtgatctcagaggccaaagggccctgcttccgcgtgctccgcgacggcggctgttcgctgcccattctgcggaacatcactaaacagatctgctgctgcagccgcgtaggcaaggcctggggccggggctgccagctctgcccacccttcggctcagagggtttccgggagatctgcccggctggtcctggttaccactactcggcctccgacctccgctacaacaccagacccctgggccaggagccaccccgagtgtcactcagccagcctcgtaccctgccagccacctctcggccatctgcaggctttctgcccacccatcgcctggagccccggcctgaaccccggcccgatccccggcccggccctgagcttcccttgcccagcatccctgcctggactggtcctgagattcctgaatcaggtccctcctccggcatgtgtcagcgcaacccccaggtctgcggcccaggacgctgcatttcccggcccagcggctacacctgcgcttgcgactctggcttccggctcagcccccagggcacccgatgcattgatgtggacgaatgtcgccgcgtgcccccgccctgtgctcccgggcgctgcgagaactcaccaggcagcttccgctgcgtgtgcggcccgggcttccgagccggcccacgggctgcggaatgcctggatgtggacgagtgccaccgcgtgccgccgccgtgtgacctcgggcgctgcgagaacacgccaggcagcttcctgtgcgtgtgccccgccgggtaccaggctgcaccgcacggagccagctgccaggatgtggatgaatgcacccagagcccaggcctgtgtggccgagggggctgcaagaacctgcctggctctttccgctgtgtttgcccggctggcttccggggctcggcgtgtgaagaggatgtggatgagtgtgcccaggaaccgccgccctgtgggcccggccgctgtgacaacacggcaggctcctttcactgtgcctgccctgctggcttccgctcccgagggcccggggccccctgccaagatgtggatgagtgtgcccgaagccccccaccctgcacctacgggcggtgtgagaacacagaaggcagcttccagtgtgtctgccccatgggcttccaacccaacactgctggctccgagtgcgaagatgtggatgaatgtgaaaaccacctcgcatgccctgggcaggaatgtgtgaactcgcccggctccttccagtgcaggacctgtccttctggccaccacctgcaccgtggcagatgcactgatgtggacgaatgcagttcgggtgcccctccctgtggtccccacggccactgcactaacaccgaaggctccttccgctgcagctgcgcgccaggctaccgggcgccgtcgggtcggcccgggccctgcgcagacgtgaacgagtgcctggagggcgatttctgcttccctcacggcgagtgcctcaacactgacggctcctttgcctgtacttgtgcccctggctaccgacccggaccccgcggagcctcttgcctcgacgttgacgagtgcagcgaggaggacctttgccagagcggcatctgtaccaacaccgacggctccttcgagtgcatctgtcctccgggacaccgcgctggtccggacctcgcctcctgtctcgacgtggacgaatgtcgcgagcgaggtccagccctgtgcgggtcgcagcgttgtgagaactctcccggctcctaccgctgtgtccgggactgcgatcctgggtaccacgcgggccccgagggcacctgtgacgatgtggatgagtgccaagaatatggtcccgagatttgtggagcccagcgttgtgagaacacccctggctcctaccgctgtacaccagcctgtgaccctggctatcagcccacgccagggggcggatgccaggatgtggacgaatgccggaaccggtccttctgcggtgcccacgccgtgtgccagaacctgcccggctccttccagtgcctctgtgaccagggttacgagggggcacgggatgggcgtcactgcgtggatgtgaacgagtgtgaaacactacagggtgtatgtggagctgccctgtgtgaaaatgtcgaaggctccttcctctgtgtctgccccaacagcccggaagagtttgaccccatgactggacgctgtgttcccccacgaacttctgttggcatgtccccaggctcgcagccccaggcacctgttagccccgttctgcccgccaggccacctccgccacccctgtcccgccgacccagaaaacctaggaagggccctgtggggagtgggtgccgggagtgctattttgacacagcggccccggatgcatgtgacaacatcctggctcggaatgtgacatggcaggagtgctgctgtactgtgggtgagggctggggcagcggctgccgcatccagcagtgcccgggcaccgagacagctgagtaccagtcattgtgccctcacggccggggctacctggcgcccagtggagacctgagcctccggagagacgtggacgaatgtcagctcttccgagaccaggtgtgcaagagtggcgtgtgtgtgaacacggccccgggctactcatgctattgcagcaacggctactactaccacacacagcggctggagtgcatcgataatgacgagtgcgccgatgaggaaccggcctgtgagggcggccgctgtgtcaacactgtgggctcttatcactgtacctgcgagcccccactggtgctggatggctcgcagcgccgctgcgtctccaacgagagccagagcctcgatgacaatctgggagtgtgctggcaggaagtgggggctgacctcgtgtgcagccaccctcggctggaccgtcaggccacctacacagagtgctgctgcctgtatggagaggcctggggcatggactgcgccctctgccctgcgcaggactcagatgacttcgaggccctgtgcaatgtgctacgcccccccgcatatagccccccgcgaccaggtggctttggactcccctacgagtacggcccagacttaggtccaccttaccagggcctcccatatgggcctgagttgtacccaccacctgcgctaccctacgacccctacccaccgccacctgggcccttcgcccgccgggaggctccttatggggcaccccgcttcgacatgccagactttgaggacgatggtggcccctatggcgaatctgaggctcctgcgccacctggcccgggcacccgctggccctatcggtcccgggacacccgccgctccttcccagagcccgaggagcctcctgaaggtggaagctatgctggttccctggctgagccctacgaggagctggaggcggaggagtgcgggatcctggacggctgcaccaacgaccgctgcgtgcgcgtccccgaaggcttcacctgccgttgcttcgacggctaccgcctggacatgacccgcatggcctgcgttgacatcaacgagtgtgatgaggccgaggctgcctccccgctgtgcgtcaacgcgcgttgcctcaacacggatggctccttccgctgcatctgccgcccgggattcgcacccacgcaccagccgcaccactgtgcgcccgcacggccccgggcctgagccctggcacccgctggccacccacccgcgcccgccactcggggcccctgccgcgcatcctgcagcccgcttatgcgtatgtgcacggggccgcccgcctggacctggagaagggacctacggacgcctggaagctgcgacgccctgcactgctcccgcctccaccagcgcctcccactgatgtcgtggtcccgggcctggcccaggggcccctttacatgccctctcccttttataaaattttccattaaaaaccacctattttctaaaaaaaaaaaaaaaaaaaaaaa

SEQ ID NO: 95 - DNA, 2531 bp, human
gacacaaatggtcaggcggcggcggcggagaaggaggcggaggcgcaggggggagccgagcccgctgggctgcggagagttgcgctctttacggggccgcggccactagcgcggcgccgccagccgggagccagcgagccgagggccaggaaggcgggacagaccccggcgcgcccgagccacccgggttctccccgccgcccgcgcttcatgaatcgcaagtttccgcggcggcggcggctgcggtacgcagaacaggagccgggggagcgggccgaaagcggcttgggctcgacggagggcaccggcgcagaggtctccctggccgcagggggagccgccgccggccgtgcccctggcagccccagcggagcggcgccaagagaggagccgagaaagtatggctgaggaggaggcgcctaagaagtcccgggccgccggcggtggcgcgagctgggaactttgtgccggggcgctctcggcccggctggcggaggagggcagcggggacgccggtggccgccgccgcccgccagttgacccccggcgattggcgcgccagctgctgctgctgctttggctgctggaggctccgctgctgctgggggtccgggcccaggcggcgggccaggggccaggccaggggcccgggccggggcagcaaccgccgccgccgccgcctcagcagcaacagagcgggcagcagtacaacggcgagcggggcatctccgtcccggaccacggctattgccagcccatctccatcccgctgtgcacggacatcgcgtacaaccagaccatcatgcccaacctgctgggccacacgaaccaggaggacgcgggcctggaggtgcaccagttctaccctctagtgaaagtgcagtgttccgctgagctcaagttcttcctgtgctccatgtacgcgcccgtgtgcaccgtgctagagcaggcgctgccgccctgccgctccctgtgcgagcgcgcgcgccagggctgcgaggcgctcatgaacaagttcggcttccagtggccagacacgctcaagtgtgagaagttcccggtgcacggcgccggcgagctgtgcgtgggccagaacacgtccgacaagggcaccccgacgccctcgctgcttccagagttctggaccagcaaccctcagcacggcggcggagggcaccgtggcggcttcccggggggcgccggcgcgtcggagcgaggcaagttctcctgcccgcgcgccctcaaggtgccctcctacctcaactaccacttcctgggggagaaggactgcggcgcaccttgtgagccgaccaaggtgtatgggctcatgtacttcgggcccgaggagctgcgcttctcgcgcacctggattggcatttggtcagtgctgtgctgcgcctccacgctcttcacggtgcttacgtacctggtggacatgcggcgcttcagctacccggagcggcccatcatcttcttgtccggctgttacacggccgtggccgtggcctacatcgccggcttcctcctggaagaccgagtggtgtgtaatgacaagttcgccgaggacggggcacgcactgtggcgcagggcaccaagaaggagggctgcaccatcctcttcatgatgctctacttcttcagcatggccagctccatctggtgggtgatcctgtcgctcacctggttcctggcggctggcatgaagtggggccacgaagccatcgaagccaactcacagtattttcacctggccgcctgggctgtgccggccatcaagaccatcaccatcctggcgctgggccaggtggacggcgatgtgctgagcggagtgtgcttcgtggggcttaacaacgtggacgcgctgcgtggcttcgtgctggcgcccctcttcgtgtacctgtttatcggcacgtcctttctgctggccggctttgtgtcgctcttccgcatccgcaccatcatgaagcacgatggcaccaagaccgagaagctggagaagctcatggtgcgcattggcgtcttcagcgtgctgtacactgtgccagccaccatcgtcatcgcctgctacttctacgagcaggccttccgggaccagtgggaacgcagctgggtggcccagagctgcaagagctacgctatcccctgccctcacctccaggcgggcggaggcgccccgccgcacccgcccatgagcccggacttcacggtcttcatgattaagtaccttatgacgctgatcgtgggcatcacgtcgggcttctggatctggtccggcaagaccctcaactcctggaggaagttctacacgaggctcaccaacagcaaacaaggggagactacagtctgagacccggggctcagcccatgcccaggcctcggccggggcgcaacgatcccccaaagccagcgccgtggagttcgtgccaatcctgacatctcgaggtttcctcactaacaactctctttcgcaggctcctttgaacaactcagctcctgcaaaagcttccgtccctgaagcaaaaggacacgaa

SEQ ID NO: 96 - DNA, 4041 bp, human
agttctggaaagtcattgacaggggattaacctagaacatcaattataaacaggcagcaggcctcaggcccagacttgggtgttacaggaacagtgtggcctctctggaactctgcagaccacctgccgtgatgctgaagttccgaacagtccatgggggcctgaggctcctgggaatccgccgaacctccaccgcccccgctgcctccccaaatgtccggcgcctggagtataagcccatcaagaaagtcatggtggccaacagaggtgagattgccatccgtgtgttccgggcctgcacggagctgggcatccgcaccgtagccatctactctgagcaggacacgggccagatgcaccggcagaaagcagatgaagcctatctcatcggccgcggcctggcccccgtgcaggcctacctgcacatcccagacatcatcaaggtggccaaggagaacaacgtagatgcagtgcaccctggctacgggttcctctctgagcgagcggacttcgcccaggcctgccaggatgcaggggtccggtttattgggccaagcccagaagtggtccgcaagatgggagacaaggtggaggcccgggccatcgccattgctgcgggtgttcccgttgtccctggcacagatgcccccatcacgtccctgcatgaggcccacgagttctccaacacctacggcttccccatcatcttcaaggcggcctatgggggtggagggcgtggcatgagggtggtgcacagctacgaggagctggaggagaattacacccgggcctactcagaggctctggccgcctttgggaatggggcgctgtttgtggagaagttcatcgagaagccacggcacatcgaggtgcagatcttgggggaccagtatgggaacatcctgcacctgtacgagcgagactgctccatccagcggcggcaccagaaggtggtcgagattgcccccgccgcccacctggacccgcagcttcggactcggctcaccagcgactctgtgaaactcgctaaacaggtgggctacgagaacgcaggcaccgtggagttcctggtggacaggcacggcaagcactacttcatcgaggtcaactcccgcctgcaggtggagcacacggtcacagaggagatcaccgacgtagacctggtccatgctcagatccacgtgtctgagggcaggagcctacccgacctgggcctgcggcaggagaacatccgcatcaacgggtgtgccatccagtgccgggtcaccaccgaggaccccgcgcgcagcttccagccggacaccggccgcattgaggtgttccggagcggagagggcatgggcatccgcctggataatgcttccgccttccaaggagccgtcatctcgccccactacgactccctgctggtcaaagtcattgcccacggcaaagaccaccccacggccgccaccaagatgagcagggcccttgcggagttccgcgtccgaggtgtgaagaccaacatcgccttcctgcagaatgtgctcaacaaccagcagttcctggcaggcactgtggacacccagttcatcgacgagaacccagagctgttccagctgcggcctgcacagaaccgggcccaaaagctgttgcactacctcggccatgtcatggtaaacggtccaaccaccccgattcccgtcaaggccagccccagccccacggaccccgttgtccctgcagtgcccataggcccgcccccggctggtttcagagacatcctgctgcgagaggggcctgagggctttgctcgagctgtgcggaaccacccggggctgctgctgatggacacgaccttcagggacgcccaccagtcactgctggccactcgtgtgcgcacccacgatctcaaaaagatcgccccctatgttgcccacaacttcagcaagctcttcagcatggagaactggggaggagccacgtttgacgtcgccatgcgcttcctgtatgagtgcccctggcggcggctgcaggagctccgggagctcatccccaacatccctttccagatgctgctgcggggggccaatgctgtgggctacaccaactacccagacaacgtggtcttcaagttctgtgaagtggccaaagagaatggcatggatgtcttccgtgtgtttgactccctcaactacttgcccaacatgctgctgggcatggaggcggcaggaagtgccggaggcgtggtggaggctgccatctcatacacgggcgacgtggccgaccccagccgcaccaagtactcactgcagtactacatgggcttggccgaagagctggtgcgagctggcacccacatcctgtgcatcaaggacatggccgggctgctgaagcccacggcctgcaccatgctggtcagctccctccgggaccggttccccgacctcccactgcacatccacacccacgacacgtcaggggcaggcgtggcagccatgctggcctgtgcccaggctggagctgatgtggtggatgtggcagctgattccatgtctgggatgacttcacagcccagcatgggggccctggtggcctgtaccagagggactcccctggacacagaggtgcccatggagcgcgtgtttgactacagtgagtactgggagggggctcggggactgtacgcggccttcgactgcacggccaccatgaagtctggcaactcggacgtgtatgaaaatgagatcccagggggccagtacaccaacctgcacttccaggcccacagcatggggcttggctccaagttcaaggaggtcaagaaggcctatgtggaggccaaccagatgctgggcgatctcatcaaggtgacgccctcctccaagatcgtgggggacctggcccagtttatggtgcagaatggattgagccgggcagaggccgaagctcaggcggaagagctgtcctttccccgctccgtggtggagttcctgcagggctacatcggtgtcccccatggggggttccccgaaccctttcgctctaaggtactgaaggacctgccaagggtggaggggcggcctggagcctccctccctcccctggatctgcaggcactggagaaggagctggtagaccggcatggggaggaggtgacgccggaagatgtgctctcagcagctatgtaccccgatgtgtttgcccacttcaaggacttcactgccacctttggccccctggatagcctgaatactcgcctcttcctgcagggacccaagatcgcagaggagtttgaggtggagctggagcggggcaagacgctgcacatcaaagccctggccgtgagcgacctgaaccgggccggccagaggcaggtcttctttgagctcaatgggcagctgcggtccatcttggtcaaggacacccaggccatgaaggagatgcacttccaccccaaggccctaaaggacgtgaagggccagatcggggcgcccatgcctgggaaggtgatagacatcaaagtggtggcaggggccaaggtggccaagggccagcccctgtgtgtgctcagtgccatgaagatggagactgtggtgacctcacccatggagggtactgtccgcaaggttcatgtgaccaaggacatgacactggaaggtgacgacctcatcctggagatcgagtgatcttgccccagaccggcagcctggccatccccaagccttcaacagaagctgtgctgccacggcaggcccaggccagccagtgcccgaggccaggaaggccgggccgtggaggtcctgtccacagctggacaggagagacaccgcctgcggtggttcattcctttcagccatcgtcctttcctccggcggacagctgcttacatgttcatctcttgccaaataagggtcccctcctcactggagactacaagtggtgggtcaggtggtcctaggacccaggggaggtttaggggtcctatctcctgggggaaggggagatctaagatgtcccaggtcctgggaagtttactcaataaagctggctttcccctgc

SEQ ID NO: 97 - DNA, 6457 bp, human
gctgaccagccagtgaggacgcccgctgcctcccacctgccctcctgccgtctttcgccagccaagcccagcctgagccagcacttgcctttacgaccatgttcaaggggctgagcaaaggctcccaggggaaggggtcccccaagggctcccccgccaaggggtcccccaaaggctcccccagcaggcacagccgggctgccacccaggagctggcccttctcatctcccgcatgcaagccaacgccgaccaggtggagcgggacatcctggagacgcagaagaggctgcagcaggaccggctgaacagtgagcagagccaggccctgcagcaccagcaggagacgggccgcagcctgaaggaggctgaggtgctgctcaaggacctcttcctggacgtggacaaggcccggcggctcaagcacccgcaggctgaggagattgagaaggacatcaagcagctgcacgagcgggtgacccaggagtgtgcggagtaccgtgccctgtacgagaagatggtgctgccccccgacgtgggacccagggtcgactgggcacgcgtgctggagcagaaacagaagcaggtctgcgcaggccagtacgggccgggcatggcggagctggagcaacagatcgccgagcacaacatcctgcagaaggagatcgacgcctatgggcagcagctgcggagcctcgtggggccggatgcagccaccatccggagccaataccgagacctactgaaggcggcgtcgtggcgcgggcagagcctgggcagcctgtacacgcacctccagggctgcacgcggcagctgagcgccctggctgagcagcagcgccgcatcctgcagcaggactggagcgacctcatggccgaccctgcgggcgtgcggcgggagtacgagcacttcaagcagcacgagctgctgagccaggagcagagcgtgaaccagctggaggacgacggcgagcgcatggtggagctgcggcaccccgcggtggggcccatccaggcccaccaggaggccctgaagatggagtggcagaacttcctgaacctgtgtatctgccaggagacccagctgcagcacgtggaggactaccgccggttccaggaagaggccgactcagtcagccagaccctggcgaagctcaactccaacttggatgccaagtacagccctgcacctgggggcccccctggcgcccccacagagctgctgcaacagctggaggcagaggaaaaacggctggccgtcaccgagagggccactggggacctgcagcggcgaagccgggatgtggcccctctgccacagcgaagaaacccccctcagcagcccctgcacgtggacagcatctgcgactgggactcaggagaagtgcagctgctgcagggtgagcggtataagctggtagataacactgaaccgcacgcctgggtcgtgcagggccctggcggggagaccaagcgtgctcccgccgcctgcttctgcatcccagcaccagaccctgatgctgtggccagggcctcccggctggcctcagagctgcaggccctgaagcagaaattggccacagtccagagccgcctgaaggccagtgctgtggagtctcttcggcccagccagcaggctccatctggctcagacctggccaacccacaggcccagaagctcctgacacagatgacccggctggatggagacctgggacagatagagaggcaggtgctggcctgggcgcgggccccgctgagccgccccacacccttggaggacttggagggccgcatccacagccatgagggcacagcccagcgcctgcagagcctgggaacggagaaggagacagcccagaaggagtgcgaggcgtttctgtccacgcggcccgtgggccccgctgccctgcagctgcccgtagccctcaacagcgtgaagaacaagttcagtgacgtgcaggttctgtgcagcctctacggggagaaagccaaggctgccctggatctggagcggcagatccaggatgcggacagggtcatccgaggcttcgaggccaccctggtgcaggaggcccccatccctgctgaaccgggggctctgcaggagagggtcagcgagctgcagcgccagcggagggagctgctggaacagcagacctgcgtgctgcggctacaccgcgcgctgaaggcctcggagcacgcatgcgctgccctgcagaacaacttccaggagttctgccaagacctgcctcgccagcagcgccaggtgcgagccctcaccgaccgctaccacgccgtaggggaccagctggacctgcgggagaaggtggtgcaggatgccgccctcacctaccagcagttcaagaactgcaaggataacctgagctcctggctggagcacctgccccgcagccaggtgcggcccagcgacggccccagccagatcgcctacaagctgcaggcgcagaagaggctgacgcaggagatccagagccgagagcgggacagggccacagcatcccacctctcccaggccctgcaggcagcgctccaggactatgagctccaggcagacacctaccgctgctctttggagcccaccctggcagtgtcagcccccaagagaccccgagtggctcccctgcaagagagcatccaagcccaggagaagaaccttgcaaaggcctatactgaggttgcagcagcacagcagcagctgctccagcagctggagtttgctagaaaaatgctggagaagaaggagctcagtgaggacatccgaaggacccatgatgcaaagcagggctccgagagccctgcccaagcagggagagagtcagaggccctgaaggcccagctggaagaggagaggaagcgggtggcccgggtgcagcatgagctggaggcgcagaggagccaactgctgcagctgaggacccagcggcccttggagaggctggaggagaaggaagtggtagagttctaccgggacccccagctggagggcagcctgtccagggtgaaggcccaggtggaggaggagggcaagcggcgggctggcctgcaggcagacctggaagtggcagcccagaaggtcgtgcagctggaaagcaagaggaagaccatgcagcctcatctgctgaccaaggaggtcacccaggtggagagggaccccggcctggacagccaggcggcccagctcaggatccagatccagcagctccgcggggaggatgccgtcatctcggcccggctggaagggctgaagaaggagctactggcccttgagaagagggaggtggacgtgaaggagaaggtcgtggtgaaagaggtagtcaaggtggagaagaatctggaaatggtcaaggcagcccaggctctgaggctgcagatggaggaggatgctgcgcggaggaagcaggcggaggaggctgtggccaagctacaggctcgcatcgaagacctggagcgggctatcagctcggtggagcccaaggtcatcgtgaaggaggtgaagaaggtggagcaggacccagggctcctccaggagtcctccaggctgaggagcctcctcgaggaggagaggaccaagaacgcgacgctggccagggagctgagcgacctgcacagcaagtacagcgtggtggagaagcagaggcccaaagtgcagctccaggagcgcgtccacgagatcttccaggtggatccggagacagagcaggagatcactcggctcaaggccaagctgcaggagatggcgggcaagaggagcggtgtggagaaggaggtggagaagctgctgcccgacctggaggtcctgcgggcccagaagcccacggtggagtacaaggaggtgacccaggaggtggtgaggcatgagaggagccccgaggtgctgcgtgagatcgaccgcctgaaggctcagctcaacgagctcgtcaacagccacgggcgctcccaggagcagctcatccgcctgcagggtgagcgcgacgagtggaggcgcgagcgggccaaggtggagaccaagacggtgagcaaggaggtggtgcgccacgagaaggacccggtgctggagaaagaagcagagcggctccgccaggaggtgcgggaggcggcccagaagaggcgggccgcggaggacgcggtgtacgagctgcagagcaagcgcctgctgctggagaggaggaagcccgaggagaaggtggtggtgcaggaggtggtggtcacccagaaggacccgaagctgcgcgaggagcacagccggctgagcgggagcctggatgaggaggtgggccggcggcgccagctagagcttgaggtgcagcagctgcgggccggcgtggaggagcaggagggcctgctcagcttccaggaggaccgcagcaagaagctggccgtggagagggagctgcggcagctgaccttgaggatccaggagctcgagaagcggcctcccacggtgcaggagaagatcatcatggaggaagtggtcaagctggagaaggacccggacctggagaagtccacggaagccctgcggtgggacctggaccaggagaagacccaggtaaccgagctgaatcgggagtgcaagaacctgcaggtccagattgacgtcctccagaaagccaaatcgcaggagaagaccatctacaaggaagtgatccgggtgcagaaggaccgcgtcctggaagatgagcgggcccgcgtgtgggagatgctcaacagggagcgcacggcccggcaggcccgggaggaggaggcacggcgcctgcgggagcgcattgaccgggccgagacgctggggagaacctggtcccgggaggagtccgagctgcagagggcccgggaccaggccgaccaggagtgtgggcggctgcagcaggagctgcgggctctggagaggcagaagcagcagcagacactgcagctgcaggaggagtcgaagctgctcagccagaagacggagagcgagcgacagaaggcggcccagcggggccaggagctctcgcggctggaggcggccatcctccgcgagaaggaccagatctacgagaaggagcggacgctccgggacctccacgccaaggtgagccgggaggagctcagccaggagacccagacgcgagagaccaacctttccaccaagatctccatcctggaacccgagacggggaaggacatgtccccatacgaggcctacaagaggggcatcatcgacaggggccagtacttgcagctgcaggagctcgagtgtgactgggaggaggtcaccacctcggggccctgtggggaggagtctgtgctcctggaccgcaagagcgggaagcagtactccatcgaggccgccctccgctgccggcgcatctctaaggaggagtaccatctgtacaaggacggccacctgcccatctccgagtttgcgctgcttgtagctggggagaccaagccaagctcctcactctccatcggctctatcatctccaagtccccgctcgcctccccggccccccagagcaccagtttcttctctcccagcttctctctcgggctcggtgatgacagcttccctatcgccgggatctatgacacaaccacagacaacaagtgcagcatcaagacggccgtggccaagaacatgctggaccccatcactgggcagaagctactggaggcccaggcggccacagggggcatcgtggacctgctcagccgtgagcgctactctgtgcacaaggcgatggagaggggcctgatcgagaacacctccacacagaggctgcttaacgcccagaaggccttcaccggcatcgaggaccccgtcaccaagaagaggctctcggtgggcgaggccgtccagaagggctggatgccccgggagagcgtgctcccacacctgcaggtgcagcacctgaccggggggctcatcgaccccaagaggacaggccgcatccccatccagcaggccctcctctccgggatgatcagtgaagagctggcccagctcctgcaggacgagtccagctacgagaaggatttgacagaccccatctccaaggaacggctgagctacaaggaggccatgggccgctgccgcaaagaccccctgagcggcctgctgctcctgccagcggcactggaggggtaccgctgctaccgctccgcctcccccaccgtcccgcgctcccttcgctgacacgggccaaggagccagtggggaagtgcgtgtgttgggccaggtaggatacgtacacctcttgcctcagagcagcctcatcccaggcagtgggtcttccctctgtccaaccactgttttattattttactaacatggtgatgggctccctcccctaaccttggtgcctgatccatccccagaccaggacagcagccactcagttcttcctccacctccacccagtgatcccaataaacgaattctgtctccccgtg

SEQ ID NO: 98 - DNA, 7642 bp, human
cggaccctgcgcgcccccgtcccggctcccggccggctcgggggagaaggcgcccgaggggaggcgccggacagatcgcgtttcggaggcggcgcaggtgctgtaaactgcaaaccataatcctgtcttaatactgcaaacaaatcatagtggaactaaggggaacttaatttactgtttccaggttaactaaggtctcagctgtaaaccaaaagtgagaggagacattaagattttcattcttaccgggttgtcttcttcctgaagagcaatggagccgcttttacttggaagaggactaatcgtatatctaatgttcctcctgttaaaattctcaaaagcaattgaaataccatcttcagttcaacaggttccaacaatcataaaacagtcaaaagtccaagttgcctttcccttcgatgagtattttcaaattgaatgtgaagctaaaggaaatccagaaccaacattttcgtggactaaggatggcaaccctttttatttcactgaccatcggataattccatcgaacaattcaggaacattcaggatcccaaacgaggggcacatatctcactttcaagggaaataccgctgctttgcttcaaataaactgggaatcgctatgtcagaagaaatagaatttatagttccaagtgttccaaaattcccaaaagaaaaaattgaccctcttgaagtggaggagggagatccaattgtcctcccatgcaatcctcccaaaggcctcccacctttacacatttattggatgaatattgaattagaacacatcgaacaagatgaaagagtatacatgagccaaaagggagatctatacttcgcaaacgtggaagaaaaggacagtcgcaatgactactgttgctttgctgcatttccaagattaaggactattgtacagaaaatgccaatgaaactaacagttaacagtttaaagcatgctaatgactcaagttcatccacagaaattggttccaaggcaaattccatcaagcaaagaaaacccaaactgctgttgcctcccactgagagtggcagtgagtcttcaattaccatcctcaaaggggaaatcttgctgcttgagtgttttgctgaaggcttgccaactccacaggttgattggaacaaaattggtggtgacttaccaaaggggagagaagcaaaagaaaattatggcaagactttgaagatagagaatgtctcctaccaggacaaaggaaattatcgctgcacagccagcaatttcttgggaacagccactcacgattttcacgttatagtagaagagcctcctcgctggacaaagaagcctcagagtgctgtgtatagcaccggaagcaatggcatcttgttatgtgaggctgaaggagaacctcaacccacaatcaagtggagagtcaatggctccccagttgacaatcatccatttgctggtgatgttgtcttccccagggaaatcagttttaccaaccttcaaccaaatcatactgctgtgtaccagtgtgaagcctcaaatgtccatggaactatccttgccaatgccaatattgatgttgtggatgtccgtccattgatacaaaccaaagatggagaaaattacgctacagtggttgggtacagtgctttcttacattgcgagttctttgcttcacctgaggcagtcgtgtcctggcagaaggtggaagaagtgaaacccctggagggcaggcggtatcatatctatgaaaatggcacattgcagatcaacagaaccaccgaagaagatgctgggtcttactcatgttgggtagaaaatgctataggaaaaactgcagtcacagccaatttggatattagaaatgctacaaaacttagagtttctcctaagaatcctcgtatccccaaattgcatatgcttgaattacattgtgaaagcaaatgtgactcacatttgaaacacagtttgaagttgtcctggagtaaagatggagaagcctttgaaattaatggcacagaagatggcaggataattattgatggagctaatttgaccatatctaatgtaactttagaggaccaaggtatttactgctgttcagctcatactgctctagacagtgctgccgatataactcaagtaactgttcttgatgttccggatccaccagaaaaccttcacttgtctgaaagacagaacaggagtgttcggctgacctgggaagctggagctgaccacaacagcaatattagcgagtatattgttgaatttgaaggaaacaaagaagagcctggaaggtgggaggaactgaccagagtccaaggaaagaaaaccacagttatcttacctttggctccatttgtgagataccagttcagggtcatagccgtgaacgaagtagggagaagtcagcctagccagccgtcagaccatcatgaaacaccaccagcagctccagataggaatccacaaaacataagggttcaagcctctcaacccaaggaaatgattataaagtgggagcctttgaaatccatggagcagaatggaccaggcctagagtacagagtgacctggaagccacagggagccccagtggagtgggaagaagaaacagtcacaaaccacacattgcgggtgatgacgcctgctgtctatgccccttatgatgtcaaggtccaggctatcaatcaactaggatctgggcctgaccctcagtcagtgactctctattctggagaagactatcctgatacagctccagtgatccatggggtggacgttataaacagtacattagttaaagttacctggtcaacagttccaaaggacagagtacatggacgtctgaaaggctatcagataaattggtggaaaacaaaaagtctgttggatggaagaacacatcccaaagaagtgaacattctaagattttcaggacaaagaaactctggaatggttccttccttagatgcctttagtgaatttcatttaacagtcttagcctataactctaaaggagctggtcctgaaagtgagccttatatatttcaaacaccagaaggagtacctgaacagccaacttttctaaaggtcatcaaagttgataaagacactgccactttatcttggggactacctaagaaattaaatggaaacttaactggctatcttttgcaatatcagataataaatgacacctacgagattggagaattaaatgatattaacattacaactccatcaaagcccagctggcacctctcaaacctgaatgcaactaccaagtacaaattctacttgagggcttgcacttcacagggctgtggaaaaccgatcacggaggaaagctccaccttaggagaagggagtaaaggtatcgggaagatatcaggagtaaatcttactcaaaagactcacccagtagaggtatttgagccgggagctgaacatatagttcgcctaatgactaagaattggggcgataacgatagcatttttcaagatgtaattgagacaagagggagagaatatgctggtttatatgatgacatctccactcaaggctggtttattggactgatgtgtgcgattgctcttctcacactactattattaactgtttgctttgtgaagaggaatagaggtggaaagtactcagttaaagaaaaggaagatttgcatccagacccagaaattcagtcagtaaaagatgaaacctttggtgaatacagtgacagtgatgaaaagcctctcaaaggaagccttcggtcccttaatagggatatgcagcctactgaaagtgctgacagcttagtcgaatacggagagggagaccatggtctcttcagtgaagatggatcatttattggtgcctacgctggatctaaggagaagggatctgttgaaagcaatggaagttctacagcaacttttccccttcgggcataaacacaacatatgtaagcaacgctactggttcaccccaaccttccatatttatctgttcaaaggagcaagaactttcatataggaatagaaacatgctggccgaagatttcatccagaagtcaacatcctgcaattatgttgaaaagagtagtactttcttcaaaatataaaatgccaagcacttcaggcctatgttttgcttatattgttttcaggtgctcaaaatgcaaaacacaaaacaaatcctgcatttagatacacctcaactaaatccaaagtccccattcagtatattccatatttgcctgattttactattcggtgtgtttgcatagatgttgctacttggtgggtttttctccgtatgcacattggtatacagtctctgagaactggcttggtgactttgcttcactacaggttaaaagaccataagcaaactggttatttaaaatgtaaaaaggaatatgaaagtcttattaaaacacttcattgaaaatatacagtctaaatttattatttaaattttactagcaaaagtcttaggtgaacaatcaactagtatttgttgagctcctatttgcccagagatggtcatatttaaacagaagtatacgtttttcagtttcaacatgaatttttttatttctgtcagttatgacatccacgagcatcactttttgtgtctgtttttttttttttcttggactaaattcaactgcatggaagcggtggtcagaaggttgttttatacgagaacaggcagaaagtgcccattgttcaggattctaatagctacatctacttaatatcttcatttctaaattgactgcttttacctttttctcatgtttatataatggtatgcttgcatatatttcatgaatacattgtacatattatgttaatatttacacaatttaaaatatagatgtgttttattttgaagtgagaaaatgaacattaacaggcatgtttgtacagctagaatatattagtaagatactgtttttcgtcattccagagctacaactaataacacgaggttccaaagctgaagactttgtataaagtatttgggttttgttcttgtattgctttctttcaacagtttcaaaataaaatatcatacaaatattgagggaaatgttttcatatttttcaaaataggtttttattgttgaatgtacatctaccccagcccctcaaaagaaaaactgtttacatagaaattcctacacatacgtttgcgtatatgttattttaaacatctttgtggtgagaattttttccccgatattctccttctgtcaaagtcagaacaaattcagggaatttattttctggcagttgtgctccagtccttttaaaattgtacatgaacatgttttagaaacaatatggaggatgatgcatacatgtcggtcaagttcagcgctcgacattttatggaaagatttttttaaccttaccacgaaatacttaactactgtttaagtgaattgacttatttcactttagtttttgaactgtgattattggtatactgttatatcctcaacttggatttatggtaaccccttttagttcatggagaccaaaatttggggtatttataatagtcagcgcaggaatgcacatggaatatctacttgtccttttgaacctcacgagtcatccagaatgtatagacaggaaaagcatgtcttatttaaaactgtaatttatgggctcaggatctgaccgcagtcccgggagtaagcatttcaaagggggaaggcagtgtggtccctaccctgtgtgaatgtgaggatgtagacatccatcagtgcaactcgagctccatcctcctccgatttctaaggttccagttttctggagggacagtcatcatgttttgatttatctgggagaaaactgtggtgcacagcttgtgaggagggcaaggttgtgacgttcgagcttagttctggtgttattctgtctcctcttctttgtcatcagccaaaacgtggtttttaaagagagtcatgcaggttagaaataatgtcaaaaatatttaggaatttaataacctttaagtcagaaactaaaacaaatactgaaatattagctcttcctacacttcgtgttcccctttagctgcctgaaaatcaagattgctcctactcagatcttctgagtggctaaaacttatggatatgaaaaatgagattgaatgatgactatgctttgctatcattgttacctttcctcaatactatttggcaactactgggactcttcagcacaaaaggaatagatctatgattgaccctgattttaattgtgaaattatatgattcatatattttatgaatcagaataaccttcaaataaaataaatctaagtcggttaaaatggatttcatgattttccctcagaaaatgagtaacggagtcccacggcgtgcaatggtaattataaattggtgatgcttgtttgcaaattgcccactcgtgataagtcaacagccaatatttaaaactttgttcgttactggctttaccctaactttctctagtctactgtcaatatcattttaatgtaattgattgtatatagtctcaagaatggttggtgggcatgagttcctagagaactgtccaagggttgggaaaatccaaattctcttcctggctccagcactgattttgtacataaacattaggcaggttgcttaacctttttatttcaaactctctcaactctaaagtgctaataataatctcagttaccttatctttgtcacagggtgttcttttttatgaagaaaaatttgaaaatgataaaagctaagatgccttctaacttcataagcaaacctttaactaattatgtatctgaaagtcacccccacataccaactcaacttttttcctgtgaacacataaatatatttttatagaaaaacaaatctacataaaataaatctactgtttagtgagcagtatgacttgtacatgccattgaaaattattaatcagaagaaaattaagcagggtctttgctatacaaaagtgttttccactaattttgcatgcgtatttataagaaaaatgtgaatttggtggttttattctatcggtataaaggcatcgatattttagatgcacccgtgtttgtaaaaatgtagagcacaatggaattatgctggaagtctcaaataatatttttttcctattttatactcatggaagagataagctaaagaggggacaataatgagaaatgttggtgtgcttttctaagcatttaaaacataattgccaattgaaaccctaaatatgtttacataccattaagatatgattcatgtaacaatgttaaattaattataatgggattgggtttgttatctgtggtagtatatatcctagtgttcctatagtgaaataagtagggttcagccaaagctttctttgttttgtaccttaaattgttcgattacgtcatcaaaagagatgaaaggtatgtagaacaggttcacgtgattacctttttcttttggcttggattaatattcatagtagaactttataaaacgtgtttgtattgtaggtggtgtttgtattatgcttatgactatgtatggtttgaaaatattttcattatacatgaaattcaactttccaaataaaagttctacttcatgt

SEQ ID NO: 99 - DNA, 3805 bp, human
ggctcggctcctagagctgccacggccatggccagagcccgcccgccgccgccgccgtcgccgccgccggggcttctgccgctgctccctccgctgctgctgctgccgctgctgctgctgcccgccggctgccgggcgctggaagagaccctcatggacacaaaatgggtaacatctgagttggcgtggacatctcatccagaaagtgggtgggaagaggtgagtggctacgatgaggccatgaatcccatccgcacataccaggtgtgtaatgtgcgcgagtcaagccagaacaactggcttcgcacggggttcatctggcggcgggatgtgcagcgggtctacgtggagctcaagttcactgtgcgtgactgcaacagcatccccaacatccccggctcctgcaaggagaccttcaacctcttctactacgaggctgacagcgatgtggcctcagcctcctcccccttctggatggagaacccctacgtgaaagtggacaccattgcacccgatgagagcttctcgcggctggatgccggccgtgtcaacaccaaggtgcgcagctttgggccactttccaaggctggcttctacctggccttccaggaccagggcgcctgcatgtcgctcatctccgtgcgcgccttctacaagaagtgtgcatccaccaccgcaggcttcgcactcttccccgagaccctcactggggcggagcccacctcgctggtcattgctcctggcacctgcatccctaacgccgtggaggtgtcggtgccactcaagctctactgcaacggcgatggggagtggatggtgcctgtgggtgcctgcacctgtgccaccggccatgagccagctgccaaggagtcccagtgccgcccctgtccccctgggagctacaaggcgaagcagggagaggggccctgcctcccatgtccccccaacagccgtaccacctccccagccgccagcatctgcacctgccacaataacttctaccgtgcagactcggactctgcggacagtgcctgtaccaccgtgccatctccaccccgaggtgtgatctccaatgtgaatgaaacctcactgatcctcgagtggagtgagccccgggacctgggtgtccgggatgacctcctgtacaatgtcatctgcaagaagtgccatggggctggaggggcctcagcctgctcacgctgtgatgacaacgtggagtttgtgcctcggcagctgggcctgtcggagccccgggtccacaccagccatctgctggcccacacgcgctacacctttgaggtgcaggcggtcaacggtgtctcgggcaagagccctctgccgcctcgttatgcggccgtgaatatcaccacaaaccaggctgccccgtctgaagtgcccacactacgcctgcacagcagctcaggcagcagcctcaccctatcctgggcacccccagagcggcccaacggagtcatcctggactacgagatgaagtactttgagaagagcgagggcatcgcctccacagtgaccagccagatgaactccgtgcagctggacgggcttcggcctgacgcccgctatgtggtccaggtccgtgcccgcacagtagctggctatgggcagtacagccgccctgccgagtttgagaccacaagtgagagaggctctggggcccagcagctccaggagcagcttcccctcatcgtgggctccgctacagctgggcttgtcttcgtggtggctgtcgtggtcatcgctatcgtctgcctcaggaagcagcgacacggctctgattcggagtacacggagaagctgcagcagtacattgctcctggaatgaaggtttatattgacccttttacctacgaggaccctaatgaggctgttcgggagtttgccaaggagatcgacgtgtcctgcgtcaagatcgaggaggtgatcggagctggggaatttggggaagtgtgccgtggtcgactgaaacagcctggccgccgagaggtgtttgtggccatcaagacgctgaaggtgggctacaccgagaggcagcggcgggacttcctaagcgaggcctccatcatgggtcagtttgatcaccccaatataatccggctcgagggcgtggtcaccaaaagtcggccagttatgatcctcactgagttcatggaaaactgcgccctggactccttcctccggctcaacgatgggcagttcacggtcatccagctggtgggcatgttgcggggcattgctgccggcatgaagtacctgtccgagatgaactatgtgcaccgcgacctggctgctcgcaacatccttgtcaacagcaacctggtctgcaaagtctcagactttggcctctcccgcttcctggaggatgacccctccgatcctacctacaccagttccctgggcgggaagatccccatccgctggactgccccagaggccatagcctatcggaagttcacttctgctagtgatgtctggagctacggaattgtcatgtgggaggtcatgagctatggagagcgaccctactgggacatgagcaaccaggatgtcatcaatgccgtggagcaggattaccggctgccaccacccatggactgtcccacagcactgcaccagctcatgctggactgctgggtgcgggaccggaacctcaggcccaaattctcccagattgtcaataccctggacaagctcatccgcaatgctgccagcctcaaggtcattgccagcgctcagtctggcatgtcacagcccctcctggaccgcacggtcccagattacacaaccttcacgacagttggtgattggctggatgccatcaagatggggcggtacaaggagagcttcgtcagtgcggggtttgcatcttttgacctggtggcccagatgacggcagaagacctgctccgtattggggtcaccctggccggccaccagaagaagatcctgagcagtatccaggacatgcggctgcagatgaaccagacgctgcctgtgcaggtctgacaccggctcccacggggaccctgaggaccgtgcagggatgccaagcagccggctggactttcggactcttggacttttggatgcctggccttaggctgtggcccagaagctggaagtttgggaaaggcccaagctgggacttctccaggcctgtgttccctccccaggaagtgcgccccaaacctcttcatattgaagatggattaggagagggggtgatgacccctccccaagcccctcagggcccagaccttcctgctctccagcaggggatccccacaacctcacacttgtctgttcttcagtgctggaggtcctggcagggtcaggctggggtaagccggggttccacagggcccagccctggcaggggtctggccccccaggtaggcggagagcagtccctccctcaggaactggaggaggggactccaggaatggggaaatgtgacaccaccatcctgaagccagcttgcacctccagtttgcacagggatttgtcctgggggctgagggccctgtccccacccccgcccttggtgctgtcataaaagggcaggcaggggcaggctgaggagttgcccgttgccccccagagactgactctcagagccagagatgggatgtgtgagtgtgtgtgtgtgtgtgtgcgcgcgcgcgcgcgtgtgtgtgtgcacgcactggcctgcacagagagcatgggtgagcgtgtaaaagcttggccctgtgccctacagtggggacagctgggccgacagcagaataaaggcaataagatgaa

SEQ ID NO: 100 - DNA, 398 bp, human
gatgctggggctggtcctggccttgctgtcctccagctctgctgaggagtacgtgggcctgtctgcaaaccagtgtgccgtgccggccaaggacagggtggactgcggctacccccatgtcacccccaaggagtgcaacaaccggggctgctgctttgactccaggatccctggagtgccttggtgtttcaagcccctgactaggaagacagaatgcaccttctgaggcacctccagctgcccctgggatgcaggctgagcacccttgcccggctgtgattgctgccaggcactgttcatctcagtttttctgtccctttgctcccggcaagctttctgctgaaagttcatatctggagcctgatgtcttaacgaataaaggtcccatgctccacccg

SEQ ID NO: 101 - DNA, 754 bp, human
  misc_feature (454)..(454): n is a, c, g, or t
  misc_feature (486)..(486): n is a, c, g, or t
  misc_feature (637)..(637): n is a, c, g, or t
gcggccgctgcacagcagcccattgctggacatgcaggtgtcagtacgcgtggtacagttgcagtagtagccggtccagtcggagtcacacaggcagtccccacagctgcactggccatggcctgagcacatctcccccttgtagcggacacaggagaagtcgtcacactcgcagtacttgcccgtgatcttgccaaagtcactgctgtggcagacacattgaccacagaggcactcgccccgctggctgcagacgggctgaccctcccgggggctgcattcgtcctgctgggaagggcgatagtcctcctctgagcactcacactgggatcccagccagccaggcccacaacggcataccccacactcaaaggtcccattgccattgttgcagcgatggctattaggttcagcttgggcctggcaggcacagtcacaatcaaaggtgacctgnacgatcaggctgtccttgaagcccacgggctntatggtaaaggacttctccttctcctggggacagcctcgcaccttggcctcaatgctgaagctcaccgtgtctccaatcttgagtcccatacaagacttgaggccagggatgacctcattgttgaggcatgtggcattgaaggatagagancactcttcaggacgtcacgcactttcagctcgactttagaacggaatttccataagcatcaacaatgagcctgaggacattgcctgaatccatggacagaacccccactgtggtccc

SEQ ID NO: 102 - DNA, 1994 bp, human
gctgccaccgctcctgccactgcagtgctcgagccccgtgcaggggagcttgcgggaggatcgaccgacagacggacgcacgccgaggcactgcgcccccagccccgcgccggtgccaccgcagcccgaccccggccgccagtccagccgcccctcgcccggtgcctaggtgcccggccccacaccgccagctgctcggcgcccgggtccgccatgcgctccgccgctgtcctggctcttctgctctgcgccgggcaagtcactgcgctccctgtgaacagccctatgaataaaggggataccgaggtgatgaaatgcatcgttgaggtcatctccgacacactttccaagcccagccccatgcctgtcagccaggaatgttttgagacactccgaggagatgaacggatcctttccattctgagacatcagaatttactgaaggagctccaagacctcgctctccaaggcgccaaggagagggcacatcagcagaagaaacacagcggttttgaagatgaactctcagaggttcttgagaaccagagcagccaggccgagctgaaagaggcggtggaagagccatcatccaaggatgttatggagaaaagagaggattccaaggaggcagagaaaagtggtgaagccacagacggagccaggccccaggccctcccggagcccatgcaggagtccaaggctgaggggaacaatcaggcccctggggaggaagaggaggaggaggaggaggccaccaacacccaccctccagccagcctccccagccagaaatacccaggcccacaggccgagggggacagtgagggcctctctcagggtctggtggacagagagaagggcctgagtgcagagccagggtggcaggcaaagagagaagaggaggaggaggaggaggaggaggctgaggctggagaggaggctgtccccgaggaagaaggccccactgtagtgctgaacccccacccgagccttggctacaaggagatccggaaaggcgagagtcggtcggaggctctggctgtggatggagctgggaagcctggggctgaggaggctcaggaccccgaagggaagggagaacaggagcactcccagcagaaagaggaggaggaggagatggcagtggtcccgcaaggcctcttccggggtgggaagagcggagagctggagcaggaggaggagcggctctccaaggagtgggaggactccaaacgctggagcaagatggaccagctggccaaggagctgacggctgagaagcggctggaggggcaggaggaggaggaggacaaccgggacagttccatgaagctctccttccgggcccgggcctacggcttcaggggccctgggccgcagctgcgacgaggctggaggccatcctcccgggaggacagccttgaggcgggcctgcccctccaggtccgaggctaccccgaggagaagaaagaggaggagggcagcgcaaaccgcagaccagaggaccaggagctggagagcctgtcggccattgaagcagagctggagaaagtggcccaccagctgcaggcactacggcggggctgagacaccggctggcagggctggccccagggcaccctgtggccctggctctgctgtccccttggcaggtcctggccagatggcccggacgctgcttccggtagggaggcagcctccagcctgcccaagcccaggccaccctatcgccccctacgcgccttgtctcctactcctgactcctacctgccctggaacatcctttgcagggcagccccacaactttaaacattgacgattccttctctgaacacaggcagctttctagaagtttcccttcctccatcctatccactgggcacaactgcaataacttctgaccttttggtgaaagctgagaactcctgactgtaacatattctgtatgaactttatctaaagaaaaataaatctgttctgggctctttcctctg

SEQ ID NO: 103 - DNA, 3257 bp, human
atttccttctccctttccccgccagcttcgcatccatctcccccaccccgtaaccccctcctgcctccatccaccggggctatggccgcagaagaggtattgcagacggtggaccattataagactgagatagagaggctaaccaaggagctcacggagaccacccacgagaagatccaggctgccgagtacgggctggtggtgctggaggagaagctgaccctcaaacagcagtatgatgaactggaggctgagtacgacagcctcaaacaggagctggagcagctcaaagaggcatttgggcagtccttctccatccaccggaaggttgctgaagatggagagactcgggaggaaacgcttctgcaggagtcagcatcgaaggaggcttactatctggggaagatcttggagatgcagaacgagctgaaacagagccgggctgtggtcactaatgtacaggcagaaaacgagaggctcaccgcagtcgtgcaggatctgaaggagaacaatgagatggtggagctacagagaatacggatgaaggatgaaatccgagaatataagttccgggaggcacggctccttcaggactatactgaattggaagaagaaaatatcacattgcagaaactagtgtccacgttgaagcagaaccaggttgaatacgaaggcttaaagcatgagattaagcgatttgaggaggagacggtactgctgaacagccagctggaagatgccatccgattgaaagagattgctgagcaccaactggaagaagccctcgagactttaaaaaatgaaagagagcaaaagaacaacctgcggaaggagctctcccagtatatcagcctcaatgataaccatatcagcatctcagtagatggactcaaatttgccgaggatgggagtgaaccaaacaatgatgacaaaatgaacggtcatatccatgggcctcttgtgaaactgaatggagactatcggactcccaccttaaggaaaggagagtctctgaaccctgtctctgacttattcagtgagctgaacatttcagaaatacagaagttgaagcagcagcttatgcaggtagagcgggaaaaggccattcttttggccaacctacaggagtcacagacacagctggaacacaccaagggggcactgacggagcagcatgagcgggtgcaccggctcacagagcacgtcaatgccatgaggggcctgcaaagcagcaaggagctcaaggctgagctggacggggagaagggccgggactcaggggaggaggcccatgactatgaggtggacatcaatggtttagagatccttgaatgcaaatacagggtggcagtaactgaggtgattgatctgaaagctgaaattaaggccttaaaggagaaatataataaatctgtagaaaactacactgatgagaaggccaagtatgagagtaaaatccagatgtatgatgagcaggtgacaagccttgagaagaccaccaaggagagtggtgagaagatggcccacatggagaaggagttgcaaaagatgaccagcatagccaacgaaaatcacagtacccttaatacggcccaggatgagttagtgacattcagtgaggagttagctcagctttaccaccatgtgtgtctatgtaataatgaaactcccaacagggtcatgctggattactataggcagagcagagtcacccgcagtggcagcctgaaagggcccgatgatcccagaggacttttgtccccacgattagccaggcggggtgtgtcatccccggtagaaacaaggacctcatctgaaccagttgcaaaagaaagcacagagcccagcaaagaaccaagtccaactaagacccccacaatctctcctgttattactgccccaccgtcatctccagtattggatacaagtgacatccgcaaagagccaatgaatatctacaaccttaatgccataatccgggaccaaatcaagcatctgcagaaagctgtggaccggtccttgcaactgtctcgtcaaagagcagcagctcgggagctagcccccatgattgataaagacaaggaagccttaatggaagagatcctcaagctaaagtccctgctgagcaccaaacgggagcagatcgccacattgagggcggtgttgaaagccaacaagcagacagctgaggtggcgctagctaatctcaagaacaaatatgaaaatgaaaaagcaatggtgactgaaaccatgacgaagcttagaaatgaactgaaggctttgaaagaagatgctgcaaccttctcatccctgagaacaatgtttgcaacaagatgtgatgaatatgtcacccagttggatgagatgcagagacagttagcagctgcagaggatgagaagaagactctgaacactttgttacgaatggctatccagcaaaaactcgccctgacccagaggctggaggacttagagtttgaccatgagcagtcccgacgcagcaaaggcaaacttggaaagagcaagatcggcagccctaaagtaagtggggaggcatcagtcaccgtgcccaccatagacacttacctcctgcatagtcagggcccacagacacccaacattcgggtcagcagtggcactcagaggaaaagacaattttcaccttccctttgtgatcagagccgtcccaggacttcaggggcttcctacctacagaatttattaagagttccccctgatcccacctccacagaatcatttcttctgaagggccccccttccatgagtgaattcatccaagggcaccggctcagcaaggaaaaaaggttaaccgtggctccaccagattgtcagcagcctgctgcctccgtaccgccacagtgctcacaactagccgggaggcaagactgcccaactgtcagtcctgacacagctctccctgaggagcagccacattccagctcccagtgcgcccctctccactgtctctccaagcctcctcacccctagtcttcatctcctgtggacgaacatctggggtggaagttttgtagccacacacaggatactgcccaagatccagcgggtgttttcttctcggttgttagatgtacaattggattaatgtccatcgttttggaagacgagaaagttgagaagaacacgaagcacagaccctgatgtgataaaacattttgtggtttctctgagtcacagataaacttctgccatcaaatggctacagttcatttaaattt

SEQ ID NO: 104 - DNA, 565 bp, human
tttcccattgatgaaaggatattttaatctagcgtaaaatgtttctttgtcgtaacagcagaatttcttgacattttacaacttaatgaaacaaaagaacaatcatctttaaagtcaaacatctatcaaattataaaccaaacacatagcaccgatatcaacctcataaaacgtgcgggcccgcagggtagaaaagaactgtctggggcactggcagcaacgtgccattccaggaactcagaatttcgaagtgaacatttttgtggcagatgcttttcctaaaaaacactgtatcatccaataaatatttgactaaaatccattttgtgcttttgggtgacgttaactgacttctttctgaggcctaataagaaacaagaaagctccttgtgtattttagagcaggattcgtcatcacaagcctcgatactgtcataaaattttaatttaaagcagaaaacatgctgatgtgtcagtgatagggcttaaaatataaaagacttcaaaaaccccccagcacttcttctctgtacaacattggggaatattatctttgctatataat

SEQ ID NO: 105 - DNA, 3865 bp, human
tttttcaattttgaacattttgcaaaacgaggggttcgaggcaggtgagagcatcctgcacgtcgccggggagcccgcgggcacttggcgcgctctcctgggaccgtctgcactggaaacccgaaagtttttttttaatatatatttttatgcagatgtatttataaagatataagtaatttttttcttcccttttctccaccgccttgagagcgagtacttttggcaaaggacggaggaaaagctcagcaacattttagggggcggttgtttctttctttcttatttcttttttaaggggaaaaaatttgagtgcatcgcgatggagaaaatgtcccgaccgctccccctgaatcccacctttatcccgcctccctacggcgtgctcaggtccctgctggagaacccgctgaagctcccccttcaccacgaagacgcatttagtaaagataaagacaaagaaaagaagctggatgatgagagtaacagcccgacggtcccccagtcggcattcctggggcctaccttatgggacaaaacccttccctatgacggagatactttccagttggaatacatggacctggaggagtttttgtcagaaaatggcattccccccagcccatctcagcatgaccacagccctcaccctcctgggctgcagccagcttcctcggctgccccctcggtcatggacctcagcagccgggcctctgcaccccttcaccctggcatcccatctccgaactgtatgcagagccccatcagaccaggtcagctgttgccagcaaaccgcaatacaccaagtcccattgatcctgacaccatccaggtcccagtgggttatgagccagacccagcagatcttgccctttccagcatccctggccaggaaatgtttgaccctcgcaaacgcaagttctctgaggaagaactgaagccacagcccatgatcaagaaagctcgcaaagtcttcatccctgatgacctgaaggatgacaagtactgggcaaggcgcagaaagaacaacatggcagccaagcgctcccgcgacgcccggaggctgaaagagaaccagatcgccatccgggcctcgttcctggagaaggagaactcggccctccgccaggaggtggctgacttgaggaaggagctgggcaaatgcaagaacatacttgccaagtatgaggccaggcacgggcccctgtaggatggcatttttgcaggctggctttggaatagatggacagtttgtttcctgtctgatagcaccacacgcaaaccaacctttctgacatcagcactttaccagaggcataaacacaactgactcccattttggtgtgcatctgtgtgtgtgtgcgtgtatatgtgcttgtgctcatgtgtgtggtcagcggtatgtgcgtgtgcgtgttcctttgctcttgccattttaaggtagccctctcatcgtcttttagttccaacaaagaaaggtgccatgtctttactagactgaggagccctctcgcgggtctcccatcccctccctccttcactcctgcctcctcagctttgcttcatgttcgagcttacctactcttccaggactctctgcttggattcactaaaaagggccctggtaaaatagtggatctcagtttttaagagtacaagctcttgtttctgtttagtccgtaagttaccatgctaatgaggtgcacacaataacttagcactactccgcagctctagtcctttataagttgctttcctcttactttcagttttggtgataatcgtcttcaaattaaagtgctgtttagatttattagatcccatatttacttactgctatctactaagtttccttttaattctaccaaccccagataagtaagagtactattaatagaacacagagtgtgtttttgcactgtctgtacctaaagcaataatcctattgtacgctagagcatgctgcctgagtattactagtggacgtaggatattttccctacctaagaatttcactgtcttttaaaaaacaaaaagtaaagtaatgcatttgagcatggccagactattccctaggacaaggaagcagagggaaatgggaggtctaaggatgaggggttaatttatcagtacatgagccaaaaactgcgtcttggattagcctttgacattgatgtgttcggttttgttgttccccttccctcacaccctgcctcgcccccacttttctagttaactttttccatatccctcttgacattcaaaacagttacttaagattcagttttcccactttttggtaatatatatatttttgtgaattatactttgttgtttttaaaaagaaaatcagttgattaagttaataagttgatgttttctaaggccctttttcctagtggtgtcatttttgaatgcctcataaattaatgattctgaagcttatgtttcttattctctgtttgcttttgaacgtatgtgctcttataaagtggacttctgaaaaatgaatgtaaaagacactggtgtatctcagaaggggatggtgttgtcacaaactgtggttaatccaatcaatttaaatgtttactatagaccaaaaggagagattattaaatcgtttaatgtttatacagagtaattataggaagttcttttttgtacagtatttttcagatataaatactgacaatgtattttggaagacatatattatatatagaaaagaggagaggaaaactattccatgttttaaaattatatagcaaagatatatattcaccaatgttgtacagagaagaagtgcttgggggtttttgaagtctttaatattttaagccctatcactgacacatcagcatgttttctgctttaaattaaaattttatgacagtatcgaggcttgtgatgacgaatcctgctctaaaatacacaaggagctttcttgtttcttattaggcctcagaaagaagtcagttaacgtcacccaaaagcacaaaatggattttagtcaaatatttattggatgatacagtgttttttaggaaaagcatctgccacaaaaatgttcacttcgaaattctgagttcctggaatggcacgttgctgccagtgccccagacagttcttttctaccctgcgggcccgcacgttttatgaggttgatatcggtgctatgtgtttggtttataatttgatagatgtttgactttaaagatgattgttcttttgtttcattaagttgtaaaatgtcaagaaattctgctgttacgacaaagaaacattttacgctagattaaaatatcctttcatcaatgggattttctagtttcctgccttcagagtatctaatcctttaatgatctggtggtctcctcgtcaatccatcagcaatgcttctctcatagtgtcatagacttgggaaacccaaccagtaggatatttctacaaggtgttcattttgtcacaagctgtagataacagcaagagatgggggtgtattggaattgcaatacattgttcaggtgaataataaaatcaaaaacttttgcaatcttaagcagagataaataaaagatagcaatatgagacacaggtggacgtagagttggcctttttacaggcaaagaggcgaattgtagaattgttagatggcaatagtcattaaaaacatagaaaaatgatgtctttaagtggagaattgtggaaggattgtaacatggaccatccaaatttatggccgtatcaaatggtagctgaaaaaactatatttgagcactggtctctcttggaattagatgtttatatcaaatgagcatctcaaatgttttctgcagaaaaaaataaaaagattctaataaaaaaa

SEQ ID NO: 106 - DNA, 3865 bp, human; identical to SEQ ID NO: 105

SEQ ID NO: 107 - DNA, 1787 bp, human
ggtagcaggaggctggaagaaaggacagaagtagctctggctgtgatggggatcttactgggcctgctactcctggggcacctaacagtggacacttatggccgtcccatcctggaagtgccagagagtgtaacaggaccttggaaaggggatgtgaatcttccctgcacctatgaccccctgcaaggctacacccaagtcttggtgaagtggctggtacaacgtggctcagaccctgtcaccatctttctacgtgactcttctggagaccatatccagcaggcaaagtaccagggccgcctgcatgtgagccacaaggttccaggagatgtatccctccaattgagcaccctggagatggatgaccggagccactacacgtgtgaagtcacctggcagactcctgatggcaaccaagtcgtgagagataagattactgagctccgtgtccagaaactctctgtctccaagcccacagtgacaactggcagcggttatggcttcacggtgccccagggaatgaggattagccttcaatgccaggctcggggttctcctcccatcagttatatttggtataagcaacagactaataaccaggaacccatcaaagtagcaaccctaagtaccttactcttcaagcctgcggtgatagccgactcaggctcctatttctgcactgccaagggccaggttggctctgagcagcacagcgacattgtgaagtttgtggtcaaagactcctcaaagctactcaagaccaagactgaggcacctacaaccatgacataccccttgaaagcaacatctacagtgaagcagtcctgggactggaccactgacatggatggctaccttggagagaccagtgctgggccaggaaagagcctgcctgtctttgccatcatcctcatcatctccttgtgctgtatggtggtttttaccatggcctatatcatgctctgtcggaagacatcccaacaagagcatgtctacgaagcagccagggcacatgccagagaggccaacgactctggagaaaccatgagggtggccatcttcgcaagtggctgctccagtgatgagccaacttcccagaatctgggcaacaactactctgatgagccctgcataggacaggagtaccagatcatcgcccagatcaatggcaactacgcccgcctgctggacacagttcctctggattatgagtttctggccactgagggcaaaagtgtctgttaaaaatgccccattaggccaggatctgctgacataattgcctagtcagtccttgccttctgcatggccttcttccctgctacctctcttcctggatagcccaaagtgtccgcctaccaacactggagccgctgggagtcactggctttgccctggaatttgccagatgcatctcaagtaagccagctgctggatttggctctgggcccttctagtatctctgccgggggcttctggtactcctctctaaataccagagggaagatgcccatagcactaggacttggtcatcatgcctacagacactattcaactttggcatcttgccaccagaagacccgagggaggctcagctctgccagctcagaggaccagctatatccaggatcatttctctttcttcagggccagacagcttttaattgaaattgttatttcacaggccagggttcagttctgctcctccactataagtctaatgttctgactctctcctggtgctcaataaatatctaatcataacagcaaaaaaaaaaaaaaaaaaa

SEQ ID NO: 108 - DNA, 3962 bp, human
aggaattccggtgagctgagcgcggcgcgcggccgggccggggagcgggcgcgccggcggcctcagcatggaggacggcttctccagctacagcagcctgtacgacacgtcctcgctgctccagttctgcaacgatgacagcgcttctgctgcaagtagcatggaggtgacagaccgcattgcttcactggagcagagagtccagatgcaagaagacgacatccagctgctcaaatcagctctagctgatgtggttcggcggctgaacattactgaggaacagcaggccgtgcttaacaggaaaggacctaccaaagcaagaccactgatgcagaccctgccttttagatccacggtcaacaatggcactgtgttaccaaagatacctactggctctctaccatccccctccgggttcaggaaagatactgctgtgccagcaaccaaaagtaacatcaagaggaccagctcttctgaacgagtgtctcctgggggtcgaagggaaagcaatggggattccagaggaaaccggaatcgcacaggctccaccagcagctcttccagtggcaaaaaagaacagtgaaagcaaacccaaggagcctgtattcagtgcagaagaaggctatgtaaaattgtttcttcgtggacgccctgttaccatgtacatgcccaaagatcaagtggattcttacagcttggaagcaaaagtagaacttccaaccaagagactcaagctggaatgggtctatgggtacaggggtcgagactgccgtaacaacctgtacttgcttccgacgggagagaccgtctacttcatcgcatccgtggtggtgttatacaacgtggaggagcaactgcagaggcattacgctggccacaacgatgacgtgaagtgcctagcagttcatcctgatcggatcacgatagcaacaggacaagttgcgggcacatcgaaggatggaaaacaattgcccccacatgtgcgcatctgggattctgtgacattgaatactctccacgtcattggaataggtttttttgaccgagcagtcacctgtattgcattctcaaaatctaatggaggaaccaatctctgtgctgtggatgactccaacgaccatgtgctctctgtatgggactggcagaaagaagaaaaactagcagatgtgaagtgctctaatgaagctgtgtttgctgcggatttccaccccacggacaccaacatcatagttacttgtggagaaatcacatctctacttttggacactagaaggaagctcccattaataagaagcaaggattattcgagaacaagaaaagccaaagttgtcctctgtgtgactttctctgaaaacggtgacaccattactggagattcaagtggcaacatcttagtatggggaaaaggtacaaatcgaataagctatgcagttcagggggcccatgagggtggcatttctccactttgtatgttaagagatggcacactggtgtcgggaggtgggaaagaccgaaagctcatttcttggagcggaaactatcaaaaacttcgtaaaacggagattccagaacagtttggtccaatacggacagtggccgaggggaaaggcgatgtgatcttgattggcacaactcgaaactttgtcctgcagggcactctgtcaggggacttcacacccattactcagggtcacactgatgagctctggggactggccatccatgcctcaaaacctcagttcttgacctgtgggcatgacaagcatgccactctctgggacgctgtgggtcaccgtcccgtctgggacaaaataatagaggatccagctcagtcttctggttttcatccttcagggtctgtggttgcagtcggaacactcactgggaggtggtttgtgtttgacacagaaacaaaagacttggtcaccgttcacacagatggaaacgaacagctctctgtaatgcgatactcaccagatgggaatttcttagccataggctcacatgacaactgcatctatatatatggcgttagtgacaacgggaggaagtacacgcgagtgggcaagtgctcgggtcattccagcttcattactcacctggactggtctgtaaactcacagttcctcgtgtcaaattccggagactacgaaatcctctactgggttccctctgcctgtaagcaagtcgtaagtgtggaaactacaagagacattgaatgggctacctatacctgcactttgggattccatgtttttggagtgtggccagaaggctcggacggaaccgacatcaatgccgtctgtcgggcccatgagaagaaactcctgtcaacaggcgacgactttggcaaagtgcacctcttctcatacccctgctcgcagttcagggctccaagccacatctacggcgggcacagcagccatgtcaccaatgtcgatttcctctgtgaagacagccacctcatctccacgggcgggaaagacacaagcatcatgcagtggcgcgtcatttagtacccaccgagagctgtggggagcagcatgggcaaggaagacacagactcgcattacccttggtcactgtgatttctgttttgtttaaaaaattcttacaaacctcaggaaaactgtgccctccgccggctaccttagcttagcgtgtcagcgggcgccacagcggaatcagcggttccgtgttcacttttgttgtacaatatatgacacagtgcacattgaataccaacaaggttgcaacgtttacattatagccacatcaacagaagtaactgggtatattcttagtaacttttctatggaactcttcaaaaatgggtcacaggatggccttttaaaacattgtatattatcttcactgttttcaccttttaggttgctaagttcaatatttgtgatgataatgaggtactgaaccacgatggctgttgaggaattggtcctaaaaggacagatcacttcagaagagtgaataactgatttgcacagctgaatcaggagacacaaagatgagactgtgtttggttacattttccaaagtttcattgcattctcccttggggaggctgtgagagagggcttgtatccctcttgtgctaagcagactctactcctaactgacttcaatatttcagcagggtacacaggcgtttccaagtttcagtgacaccgtcctgcctaaccagatgcggtcagcctcttcacacccacctggcttgcatcccccatcccttgttcacacgccctgattcacggtgagacattttgccaccttcttgtgtatattacttggcatgagatgatattgtacttgtataggattctagcaattcataataaatatgtaagactaggctttactgtcttatgcttatggacattgtatatttgtattttatgaccaagtagaccaagtcagaaagatctctctcgagcgcaccataaacctgcagagagaagtctcgaaaggctccaccaaggtaccaagggcagctgcttttcctgtcttttgtgcatgggcgacccattacagtatgagataagattgagttctgatgcgttaaacggaggtggcagaaatttgtcaagaaggccttatccatttcgattgtgtgacagattgaaatttattgtttacattggggaatgtatctcaaatttttaaatagaagagtaataaacagactttaaagcaaatattaagatttttactcattcaaggcaagtaaatgaatggaattatctgagctctatggcactggttgtttagagtgactgatgaagtgcacctttcaaaaacatttttgatgccatcaccagcctactgcagaagtgcagggcacagtaaacaccatgtattattgaagatgatctgttttgtatgtatccttgtcaaatatattctataatggaataaaaaatcctggaaagtgggggtttccttaa

SEQ ID NO: 109 - DNA, 155116 bp, human
gatcacattttaagccacaagaaggctaggatatgaggtatgaacaaaggtgttagctcagtggttctcaacctggactatacatcagaaccaccaaaagaggttctgttgggtttgttggaggtttgtttttttttttaagctcctgatgctcaagccccaccccagattaattaaatcagaatctaggaattgctcaagtatttgtatttctaaaagctctccaggtgattctcttgtgcagcttgagttaggaaccactgttagttgataactgaaggtgctattaaaaattccataatatatgagctcatgaaggctaatgagacaccccagctaagggcatcttcctctgcaacagcaatttgctattgtacaatgggggcaaacagttggtgctcaataaatttgttcaatgaaaaaaaataagtgattggctgaatgcatgaatgaatggaaatgtttgaagtcaacagtctatggaatgaaaaggattacagtcctattatcaaaatgacaagtggcaggatgggtattttaagacagatcatcttttccatcactctttcaaataccccatagaagtacttaaatcttggcccacttttaagcctgactttgttaataactggaggagtcaaagccacaaattttccacaccattactttattccagtgtttgccaaaccaaccaacagtcactatacacttttgctactggtgttattatttacctagtatgtttctttaaattgacttactttttaacataaacaaatgtattttaaagggaaactataaatcactatttcaaatagaaaagcaactaatattccatgacatcagtagaattgacagtcaaaataaatgcaacgtaagcaactgaagcagggtgtttctgcctgccaatgcttgcctctgtcagataagaagaaggattaacaagtatacggaggtgttaaagccatgggggcacttagcagagactttgtcactggcataataaggattgcaggagcgttttgcaaggagccacagtcctgccgtgcgatgccatgttatttaacatgaaaagcaggcaccacgtgtaagcatctcatggcattttcagtcaatgattgtcaagctgtactcagaaacccaggggccaccaggtagtgttgaagaggctctagaaaaaagaggaagtatttcagattctgaggaattcagtcgtcagtgttatttgtcttatagagagtatgatttttttttaaatcctatttctataaggaacaacataatcaacagagaacaaagaaacaggttgaaccctgccattgaaatcaggagaattaaccttctcattggaggcatatttgctggtttaggcctcaaaggcattacatcaaccttggatgagacaatttactaaataaaaccatgttattaaaaaaatgaatggaccatacaaaataatatatttcatgtgctcccctagctctttagtgaagtatggccctctgtgggaggttaaattattagctaaatgtatatacttggatttaaacagaatgatccactgatgttctaggaagtaaatgcactaacttattcttttttatttgccaggtatttgcttttcttttaaataatgcatgcagtagaatatgattaatataattctgatgcagaaaagcaagattgcacacttaggagagaggtctctggagccagactgcctggtctaaatccctgctctgcccttcatcatctgtgtgaccttgggcaaagtattcaacctctctgtgcctacactgccctgcttataggatgaggatgacaataagggtattacccacataaggacatcataaggatgagtaatgcatacaaaatatctaagagtcccctatacaaaatacgcactccatatgtgctacctgatatcattacagtaaaaaaaaattacacaaaatgtaatttttactaattttaattacaaaatgtaattaaaactaagtcttccttccaccctagaccccacgcctctccccaggcaaagtactgtaaaaagacccttgtgcttcttctcagaactactctatacttaccatcaagtccatccctctcttctgtgcaaatgggagcccactatccactctattctacatattgccttttttgcttaacaacatttcttgggaatgagttcattgctagtttcatacctcattctttgccagagctgcagagttttgcatcatatgggtgcaccagaatttctttaactcatccccagtgttggagatttaggttgtttctaatatttcactattacagtcactgccagaatgaatatatttaaatatacatctttcattcatatggaagaatatctttagggtagagtcttagaggtggaattgctgggtcaaacagtccattcatgtttattttgatagatattgccaaatttctcttcaaagagattgtgccaacttccataccaaccaaccacatacagaagcacctgtgtcccctcattctcaaaataatattttaaatacattaacaagatatacaaggtaatcaagttttttagtctgtttgagctgatataacaaaatatcttagactgagtaatttataagcaacagaaatctattggctacagttctggagaccagaattccaagaccaaggtgccagcagatgtggtgtctggtgaaggcctgttcctcatacacaaggacttcctgccacatcttcacatagtggaaatgttaaacaggctccctcaggcctcttttataagggcactaatcccgttcatgagggctccaccctcatgacctaattacctcccaaggaccccacctcttaatacaaacacacagggggttatatgtcaacatatgaattttggagggacaccaacattcagactatggcaccaaggaatgctattatatggaagcagttatcaaaagattgaaattacacatctgtgaaatgctaacatatgtcctttattaatgcatcaaataacaaaatctagtggcaggtaggggtgtgctgaaaagatactttttagcataccggcaacaaccctaatgtggaatgaagatacatgttgatgatatgctcacaggtactgctaataatactgttgtttgtacttcccattcgtaattgaaggaaatgcttgatttgaggtggtggctagtgcaaataacaatgtaaatttttccacccaagttttagagcctatcttggagccagctcttagagcctcattccaatgaatggcagcttatttttaatacatcaggtcagctccaggaatgtacgcttttagggaagctcttaaaattcatgtgtgggaatcagcctccatctagcctaatacatgcttcactggccttctaaaatagcaagccgagcaagaagacatagacaggcaaaggccactctaaagataccctccggaggtgtctgcctcggctgttacttagagcaactgtttgctccttcctgcaatacagctgcactcctccaccacagggttttggaaaatatcaattaaataatatattttaaacaactttgaaaaagataaaggcatctttttaatttggggcaccctattagccattaagaattaatgttattatctcctcatctgtttagtgtttagaacctctcccaagtctgctgataatggtggcaatgagggccaaaggatggagctgcttagctctggtaaatactggccaggcacagaggctcatgcctgtaatcccagcactttgggaggctgaggcaggcagatcacttgacgtctggagttcgagaccagcctggcctggccaacatggcaaaaccccgtctctactaaaaattagccaggcatggtggcacacctgtaatcccagctactcaggaggctgaggcaggagaatcacttgaaccctagggacagaggttgcagtgagctgagattatgcccccgcactcaagcctgggcaacagagcaagactctgtctcaaaaaaaaaaaaaaaaaggcatggtggctcatgcctgtaatcccagcactttgggaggccaaggcgggtggatcacgaggttaggagatcaagaccatcctggctaatatagtgaaccccgtctctactaaaagtacaaaaacaaaattagccaggcgtggtggtgggctcctgtagtcccagctactcgggaggctgaggcgggagaatggcatgaacctgggaggcggagcttgcagtgagccaagatcacgccactgcactccagcctgggcgacagagcgagactccgtctcaaaaaaaaaaagaaaagaaaagaagaaaagaaaacataaaatgtccagccacccaggacacaactgtgtggcctgaccgttcagttgtatcactcctcttatctggaaagtgctccagtgactacagaagttgctagaatttccaaaagcaagaagaaagtgatgggaaaatgtgtcaaatccacaatgggagaacactgtgtcactagaaaattatatgaccctggcaaccttaggagtatggaagaaagatttcaaacaagtttctgactatgtatctttttctaaatttttttgaatgctgaagaaatgttaaatttcattaagttttacagccagatttaatatagacataaatccctttaatgttcgtttcagtcaaaagtgagcggaacattatcgttaaaccagtgcatgtgggagaattacttgaggaaaatcaaaataggcacagttgggaacattaagccgtggccatattagacgcaagtaggcgcaatagcaaaattctttaggctctaatggactgggctattttgcttctcagtttccatacagatgagctttgttctggggcaatatggttgcagtttgagagtctatctgaaggagctcatttctctttcattagtccatgagcacagtgcaatttcagctaatactgttacacagctcctagctgggttatttggttaaatgccttcagggaaagtagcaagacagaataaaaggacaaatgcaatgcggtttcttgttctgagttcctgtagctgtggaattacattggcagttaatcattaccacgttgtactcgtgatcataaactcctgttatttaagatgttattcaagtctcacaagaaacatcttgtcttctgtggcacaatttccttgaggtcgggtttgtgcacaactataaccatagagacctgtttcttgtgcttcgtggacatgctagtaggtatatagtgccatttgtgtgaaattgaaaatgacattccctactggtgggtgaactgggaaacagcaccctgtctatgggcaaattagaaaagatgtccccttctgggtggacaaatgagcaaaaggcagcccctctgggctgaccaattcttttttaaagcctcctccaccttggggtgtgggggtggtgcacatggcttggtaagtccaatgcagaccctagttgctccctgtgggcaggaacccctggcgcaatgcacaacctgcacaactgtacacaacagccctgattacagaatccattttcacaattttgtagttggaccacagagtttgcccctcagtactctaaaaatatctgttcaatcacatcagtggatgtccatattaaatacattggtcttctttcttatggcaagtaactgccactctctgccaagggcagtgttctaaccttggaaacaaacaggacactcgtaggttgagaaacagaagaactagaggacggtgactcctaggggcttgaccagtggtgggcagtggagtggtggaaaccacggtggcacctcttcaccatcgcaatgtaatgctctcctcagcctccatcattacctggtgagctggggctcagtatctgcctgataacccaccttcagctagcatgagacacaggaggagcaagcttcaaactcccaacaaggtagtcagcctagttcataccagattcagtggctgtagcccaggagagaacgaggtatggggcacgtatgtctcagagcagagagatctgcctagaaagacaaagactgagtgagaagctatagtgtgggctatcagagggcagcctgggagcccaagaggcctcggacattggtcagggattggcaaactctttccgataaaaggccactttgtaaatactttaggctttgtggggttttgtcacaacgacttatctctgctgttagagtgcaaaagcagcgactggcaattcataaacaaatggatgtggctgtgttccgatacaactttacttacaaaaacaggccatgggctgatttagctggtgggccatattttgtgacctttgctgtcggtgatcaaagaaagaggacacaacaggagaagtcaggtgaggcattgcccatactgcgtggggcaacgtgcttgccagcttacattccttgtttcattttatcctcacagcaaccaactagtaacagttttaccacctacattttgaagatgaggaaactacagtttctaaaaaataggaaaatttccagggtcaaaaacagcctcatttcaaaaccaagtctgtttgacttgaatgtctctcttccttcccctacatcaagctggtacctgcagacgtatttgtctagggcagcccagccagggaagcccattgatcacagaggcattaaattccagatttgaaggtatggatggcagtgccagggccaggtgcaatctcaggagcctcagaagcttctctgtggatgtaaaagcaatgggcacagccaccattgactgcaggagctctcacctctctcatcaccagccattcagatagacaagccccaaatccgaaaggtgtcatctgtgggcctgcgtctttgatagccaggcaattacagcacctcatatataaaaagccagaggaatctgtgaatataataagtgactgtcctttcttagcgtggtgcaggccatctgtttgaaaagtacacactgcaaacaatgccaagttgtaattattaaactttctagctaagagcgagtctcatctttcttcctaattatgcattcaaatattcagaaattaagccttagaattattatataccagggatgggtttttttcccctgtgcattaaacttttagaagagaacatgagccatcatcagaagtttctcccagaaataactcccagagaagccctgaggtcagcttggaatcaacccaaccttctcactttcggtgtgatggtacaatgataattcaagttcttaatgatgactctgaatcatctcgatcctgaatcatcagagattaaattattttcaccaaacagctagtattttctaaagcaggaaaatcgattaaaggatttcagtaaaaagttagagaagtccaaacaaagcaagcatctggcaagcctcggtgaccagaacattaaattcaccaaacaccacctgctccaaatgtccatgttaatggcaattatagaagactccagtagcattcaaggccagtttaacttattcctgtacacaaataactttatgggagacagcattgtaattcaaatcaataaatgactcggtttggctgtacaagcataaacagaacgcttgcaaaatatggttcctccttgctagaaaccatttgatttttagccagaaaacatacagccaaacaagaataacaactgtttgccttccttaatgttcagtgtagactgttacccaaggaattaagcattagtcatcaaaacttcattgcaaaggcaacaaaataattggggttcctgagttatcatccatttcaacattcagaggccaatttgaccccagacaatacaaggtctttcttcttgttataaaagtggttgcagagttctgagggttctctgctgtaagctctgctctcagaactctccaggtcctgcttccaacccctgccatgtccggccaaactattttcccagagtcaggagcagagccaacagcctcactcagacagaccccagtgataattatcagcccaaaagataagcccaagtggaaagtttgagaagccagtcactcaggcagcagctacaaagggacaaacactctctagttttccctcactgacttcatttccctctgccagcctggtagaaacatggtctcagtccgctcaggttttgcccctgtcctccctgtctccagaagcgccctcaagcttcaaaagattcatacagccttccagagagggagacggggacctagtgctggttttcatcatctgtccactctggcttctgcagtaacaccattcccattggcctcggtggtcagttcacccagatcctgcctaaaccctggatgcttattgtcctgaccacccgaatgtcctaggccagctagttctcagcgtcacatcctcaccaacctccgctccctgctctccactggggatcaagggaatgcaggatggagctgccccaagcctgtagctcagatgcctcacaggggcatttctgatctgcaacactatgtccctgttgtgagctgagtcccaggcctctctgaggttggacatcccagcgtgcctcttcccactccaacagcacacctcagaaggaagaggcagcctcaggggcccgctgagtggccactcgtgctggatttccacccacctcaccttagggaattttaattttttctaaagagaaacaaaccagattgggcagatactcttccaaatctactgcttaagtttcaatctcagctttgaagcccagaaaaaaaagtattaacttgtgtttctctcgatattcctaccccactaactatacctaagaatgctgttatctctgaaaaattcagaggttaggagaacagaacacccttggggaagacaagttactatttcaaaatagtatctctgaaaaaaacagaaatccaaatatcgcatgggaagtcagtgggagaaaggccaaatctgagagggtctcccaggaacacggattgcgggccagatacagaattaaacttttaaagtgaatgaaagcaatctggggtctaagtggggaaggagtcgaaaaactggcaacttgccagtagttatggtcagtggagacgagaagacttcctcctctctgaaagccaagtgttgaatgaagacctagatcctggaataaaggatcaacatgcttaagactccaggcaaattactgggccaaatttcagggtgactcctgcccaagtacagcatttatttaaataaattagcattacaactctgattattacaactactggtgattttgtcacctaaacaataaaacaaaaattaatggaattagtggagttgctcttaaaaacattatgccaccacattaggcttacaaactcaagtgtgtcacaaaacttgtgtgttatcttatgataaagcacagttcctaaatatgtctcaggacccataacatcaagaaatgccaaagctggaatgtgcctctaacccagtgtttcctggcccagtgtatactgtgaaccaagaagccatctggggtcttcatttcagacccccaaaacaaaggagaggagaatgagatgaggaaaaaggaacttgagagagagcagcttctccaagcaagcagagaagggaatggggaaggaatgggttattcactaaacaatggtggatcatctcccattacagaccagaataaaaggcaaaccaactaaagacctaaatgttaaagaaaaaaaaaacccacaaaattgcttagacagttttagtggctacataattattttatgtggggaaagattctcagtgggaaaaaggaaggtgctggatgacagagaatagtacacttttgaccatatgctgtagggcataagagttcatacagatacttattgaagtttgtaatggtacatttctttgtttgatctttcgattgatgtctgttcccgcaactaggctataagttacataagggcagggatgccaccattgtattcccgtacttagcaaagtctctgacatatattggactcttaatgatatttgttgagtgaataaataaggtcaattgtggacaacgtcagggccttgggcatggggtttaaaacccataaggggaaaggaaaccagcctatgctagtctgaaggaagaagctggttgtgagctttctgtgtaaagcaaggaaactctagaggccatctcacttgtgatgtgagaactagaacatctggccatctgtccaaggaaggattaaggaagcttaccctacatcttgggttccaggtgaaatccattaaccacaagggctacatcaacttgaaaggaagacagtcctggagaacacagggcttacatttgctaaccccttgaaggcttgaaataggatgaaatggggaagcctgaaagagaatatcaagagaggatggaaaaccccaaagacatgctttggctccaacacaattttgtgaggtttggtccagtgcagcacactaatccagcactccagggaggactagaaatgtttaaagtctcccagcgctttccctttactgcgcctctggctgtacggacctaatgagatgccttgtgtttttcagaatgccgaagcaagttacgacttcagcagcaacgacccctatccttaccctcggtacacagatgactggtttaacaggtaaactgggccttgggaggtctctttgactttaggctttggggttttattctactttgttttgtttcaggcttgactaccaccagcaaaataatccccatgcttcattaaattatattgtgatttttcttcttagtggttacattctctaaagtgaaatttttaatattacaatcttcctctagaataatcttttgactgttttgttctgctaacttgaaattatttgctactttaatccattaaagagaaaagaaaatagaaataagaagttctttctcaacccattacaaggtgatttaaaacatgctgattttgctttatgtgttgaaactgtcgtagagaagtattttgccccatgggtctatgtgtttttgaaaagcattctgtacgctttctgctataaccccataacagctcatggagtccctttcaacaaaacagtaagtgtgattggcagaggtttgaagtattgcttgggacaaagatcctatgatgtcaaactacccaaacagtccatccaagagaataattttccttcagcttgttttgccactaaacatggaaatgtggtctcttttttcttcaagtaaacatttttcttaaatggttaattacatataagagatatgaagaaataaagatgtgcggtttgctcaatgaaagaatactgtaatttttaaacctagtgtttccctgttattgacgtccttgggtgaagttcataaaaacatatgaacttcaattagttgtataaaaatatatgatgtgcagagcactttatccatttttttttttatttctcatggcactctaagtagcacataaaacaaatgttgtcatttttagtttagtgataaggaaacaggctcagaagggttgaagggcttccttggtcaaacagttaaaattcaagtcaaagccaagattagccccatgcttcaaattatttccaaatccacatttgtactattctttgctgagtatcatttctattatttgatacaggcagcatgatgaccagaatatgttcaagggtagagcctcagtggacaggaagcttagattctgtctctaaagttagcaagttgacctgagacccctcagtctcatcaagggttgacacagggtacacaggttctgagtacaaatgcagaaaataagaaaaaagaaaatgaaatttaattttgtaatattttgtaaagatcattgctgatgtcggatagcacaattcattctctatccacatcacctgcaacctgaaaatgacatacaatgcttggaggtgtgtgtttagaggatgagaatgtataaaaaaggtctgaaaacttttggcatgaagtgtgttttatctctgtgacttctaaccctagatggtagcatatatttagcaaataaaccatttcagacacaagaatgtgaagttaccaaatgtgtgccattaagctggggtttagacagaattggcagtggccatccagggcacagtgctgagaagggccatgagagggtctggcttcagcaggattgattaccagctctccgcatgaatatcagaaagtgcagtggcaacatatccactggctacttgctgtctttctgtaactagtaggtactaaattagtctttgatggattgatgtaagcacaaaaatataaccaatggaaagattatcccccaatctcattttctgaacccaaacaaaatctaccctagtcaaatcttcctgggcaatgtgctataaaaatactccttaaaaaaactaaaaggttccactccaagatggccaaataggaacagctctggtctgcagctcccagcatgatcgacgcagaagatgggcaatttctgcatttccaactgaggtatctggttcatctcattgggactagttggacagtgggtgcaaggggtcggaggatttccctttcctagccaaaggaagccgtgacagactgtacctggaaaaatgggacacttctgcccaaatactgtgcttttcccatggtcttagcaaacagcagaccaggagattctctcccatgtctgggttggcaggtcccacgcccatggagctttgctcactgctagtgcagcagtctgagattgatctgcaaggcagcagcctgatggagggaggctgagacttgagtaggtaaaaaaaagtggccaggaagctcagactgggcagagcccaccacagctcagcaaggtctactgcctctatagactccacctctgtgggcagggcatagctggaaaaaaggagcagaagcttctgcagacttaaacgcccctgtctgacagatctgaagagggcagtggttctcccagcatggcatttgagctctgagaatggacagactgcctcctcaagtgggtcccttacccccatgtagcctaactaggagacacctcccagtaggggccaacagacagctcacaaaggtgggtgcccctctaggacaaagcttcaagaggaaagatcaggcagcaatatttgctgttctgcaatatttgctgttctgcagcctctgctggtgatacccaggcaaacagggtctggagtgggcctccaacagcctgcagctgagggacctgactgttagaaggaaaactaacaaacagaaaggaatagcatcaacatcaacaaaaaggacatccacacgaaaaccccatttgtagatcaccaacatcaaagaccaaaggtagataaaaccacaaatatggggagaaaccagagcagaaaagctgaaaattctaaaaaacgagtgcctcttctcctccaaaggaccgcagctcctcgacagcaacagaacaaagctggatggaaaatgactttgatgagttgacagaagtaggcttcagaagctcagtaataacaaacttgtccaagctaaaggagcatattctaacccattgcaaggaagctaaaaaccttgaaaaaaggttagatgaatggctaaccagaataaacagtgtagagaagactttaaatgacctgatggagctgaaaaccatggcacgagaacttcgtgacgcatgcaaaagcttcaatagccgatttgatcaagtggaagaaagggtaacagtgattgaagatcaaattaatgaaataaagtgagaagacaaggttagagaaaaaagagtaaaaagaaatgaaaaaaccctccaagaaatatgggactatgtgaaaagatcaaatctacgtttgattagtgtacttgaaactgacagggagaatggaaccaagttggaaaacactcttcaggatattatccaggagaacttccccaacctagcaaggcaggccaacattcagattcaggaaatacagagaacaccacaaagatactcctcaagaagaggaactccaagacacatacttgtcagattcaccaaagttgaaatgaaggaaaaaatgttaagggtagccagagagaaaggtcgggttacccacaaagggaagcccatcagactaacagcagatctctcagcagaaaccctacaagccagaggagagtggggaccaatattcaacattcttaaagaaaagaattttcaacccagaatttcatatccagccaaactaagcttcataagtgaaggagaaataaaatcctttacagacaagcaaatgctgagagattttgtcaccaccaggcctgccttacaagagctcctgaaggaagcactaaacatggaaaggaacaaccagtaccagccactgcaaaaacaccccaaattgcaaagaccatcaatgctaggaagaaactgcatcaactaacgggcaaaataaccagctaacatcataatgacagaatcaaattcacacataacaatattaaccttaaatgtaaatgggctaaatgccccaattaaaagacacagacaggcaaattggataaagagtcaagacccatcagtgtgctgtattcaggagacccatctcacgtgcggagacacatataggctcaaaattaagggatggaggaagatctaccaagcaaatggaaaacaaaaaaaacacaagggttgcaattctagtctctgataaaacagactttaaaccaacaaagatcaaaagagacaaagaagaccattacataatggtaaagggatcaattcaacaagaagagctaactatcctaaatatatatgcacccaatacaggagcacccagattcataaagcaagtccttagagacctacaaagagacttagagtcccacacaataataaggggagactttaacaccccactgtcaatattagacagatcaacgagacagaaggttaacaaggatatccaggcttgaactcagctctggaccaagtggacctaatagacatctacagaattctccaccccaaatcaacagaatatacattcttctcagcatcacatcgcacttattccaaaattgaccgcataattggaagtaaagcactcctcagcaaatgtaaaagaaaagaaatcacaacaaactgtctctcagaccacagtgcaatcaaattagaactcaggattaagaaactcactcaaaaccacacaactacatggaaactgaacaacctgctcctgaatgactactgggtacataacgaaatgaaggcagaaataaagacattctttgaaaccaatgagaacaaagacaaaacataccagaatctctgggacacatttaaagcaatgtgtagagggaaatttatagcactaaatgcccacaagagaaagcaggaaagatctaaaatcgacaccctaacatcacaattaaaagaactagagaagcgacagtgaacaaattcaaaagctagcagaaggcaagaaataactaagatcagagcagaactgaaggagctagagacacaaaaaacccttcaaaaaaaatcgatgaatccaggagctggttttttgaaaagatcaacaaaagtgatagatcactagcaagactaataaagatgaaaagagagaaaaatcaaatagacgcattcaaaaatgataaaggggatatcaccaccgatcccacagaaatacaaactaccatcagagaatactataaacacctctacacaaataaactagaaaatctagaagaaatggataaattcctgaacacaaacaccctcccaagactaaaccaggaagaagttgaatctctgaatagaccaataacaggctctgaaattgaggcaataattaatagcctaccaaccaaaaaaagtccaggaccagacggattcacagccaaattctaccagaggtacaaagaggagcggttaccgttccttgtgaaactattccagtcaacagaaaaagagggaatcctccctaactcattttatgaggccagcatcatcctgataccaaagcctggcagagacacaacaaaaaaagagaattttagaccaatgtccctgatgaacattgatgcaaaaatcctcaataaaatactggcaaaccaaatccagcagcacatcaaaaagcttatccgccacgatcaagtcagcttcatccctggaatgcaaggctggttcaacatatgcaaatcagtaaacgtaatccatcacataaacagaaccaatgacaaaaaccacatgattatctcaacagatgcagaaaaggcctttgacaaaattcaacagcccttcatgctaaaaactctcaataaactagatattgatgaaatgtatctcaaaataataagagctatttatgacaaaaccacagccaatatcatactgaatgggcaaaaactggaagcattccctttgaaaaccagcacaagacgaggatgccctctgtcaccactcctattcaacatagtgttggaagttctggccagggcaatcaggcaagagaaagaaataacggtattcaaataggaaaaaaggaagtcaaattgtccctgtttgcagatgacatgattgtatatctagaaaaccccatcgtctcagcccaaaatctccttaagctgagaagcaacttcagcaaagtctcaggatacaaaaatcaatgtgcaaaaatcacaagcatttctatacaccaataacagacaaacagaaagtcaaatcataagtgaactcccattcacaattgctacaaagagaataaaatacctaggaatccaacttacaagggatgtgaaggacctcttcaaggagaacaataaactgctgctcaacaaaagaggacacaaacaaatggaagaacattccatgctcatggataggaagaatgaatatcatggaaatggccatactgcccaaggtaatttgtagattcaatgccatccccatcaagctaccaatgactttcttcacagaattggaaaaaaactactttaaagttcatattgaaccaaaaaagagcccgcattgccaaaacaatcctatgccaaaagaacaaagctggaggcatcacgctacctgacttcaaaccataatacaaggctacagtaaccaaaacagcatggcactggtaccaaaacagatatatagaacagaacagaggcctcagaaataacaccacacatctacaactgcctgatctttgacaaacctgacaaacacaataaatggggaaaggattccctatttaataaatggtgctggcaaaactggctagccacatgtagaaagctgaaactcgatcccttccttataccttatacaaaaattaattcaagatggattaaagacttaaatgttagacctaaaaccatcaaaaccctagaagaaaacctaggcaataccactcaggacataggcatggacaaggacttcatgactaaaacaccaaaagcaatggcaacaaaagccaaaatagacaaatgggatctaattaaacttaagagcttctgcacggcagaagaaactaccatcagagtgaacaggcagcctgcagaatgggagaaaatttttgcaatctacccatctgacaaagggctaatatccagaatctacaaagaacttaaacaaatttacaagaaaaagacaaccccatcaaaaagtgggtgaaggatatgaacagacacttctcaaaagaagacatttatgcagccaacagacacatgaaaaaatgctcatcatcattggtcatcagagaaatgcaaatcaaaaccacaatgagataccatctcacaccagttagaatggtgatcattaaaaagtcaggaaacaacaaatgctggagaggatgtggagaaataggaacgcttttgcactgttggtgggagtgtaaattggttcaaccattgtggaagacagtatggtgattcctcaaggatctagaactagaaatatcatttgacccagcaatccaactactggatatatacccaaaggattataaatcatgctactataaaaacacatgcacacatatgtttattgtggcactattgacaatagcaaagacttggaaccaacccaaatgtccatcaatgatagactggattaagaaaatgtggcacatatacatcacagaatactgtgcagccataaaaaaggatgagttcatgtccttttcagggacatggatgaagctggaaatcatcattctcagcacaccatcacaaggacagaaaaccaaacactgcatgttctcactcataggtgggaattgaacaatgagaacacttggacacagggcggggaacatcacacaccagggcctgtcagggggtgtggcagactgggggaggggtagcattaggagaaatacctcatgtaaatgacaagttggtgggtgcagcaaatcaacatggcacatgtatacctatgtaacaaacctgcacgttgtgcacgtgtaccctagaacttaaagtataaaaaaaagaaaatttaagaaaaactaaaaacactaaggaaatgtcttctctcttaaatatttcatttgcaaacttgttctcaaaattataattttaaaccagctaaaaacctccaattaggactaattagtgcttagggcaataaaactcatcattgtcagcggtaagaattcccaagtgtccaattacccaagacacagtcatagtgactcaggcaagcatgatccccatgccttagggagccaatgattaagacagagtgtccactttgaccagtaaatgggttcttttcaattatcaagtcattttcaaagatcctcacgcactatggcttgttattacaaagactggatgatgccaccactcaaatcgcagctactttcaaacataactaccattgtaaatgattatgggaggctggtgaggtgaagctcaagtccacagaaccaagaaaatccttagttcaaaacatcaccattaccctgaagatgattcctgcttgagtgaaggagaatttgaataaagcgtcccttccatgagtgtacgatatgtttatttcaaaacccctctgggatgaaatgatattatgcctgatgttttcttcagtattacttatggcttgtggcaggagggaagagaatgactgaagtatagaggcaataaaattggttatgggttaatcattgttaaagctctgtgatgagtacatgggattttactctatttttgtatgtttttgatttttttctaataacaagaagtaaatttaactagcatacggcataaaaagaggtaataacaaaactaggacttcagtttggtatcatgaaactgttttggtgtgcaagcttccaaggagcttgcaatgtcaaatgattgggcaacagatgcccaagttactacaatgcaaaaatgtagcccagactaaaataacacaaggacagctaatgcaagttgaacagttactgtatttaaggcactgttctgtgttttgcatgtattcattcaactaattctcgtagtaaccctctgaaataggtattatgattttccccttttggaaactgaggcacagagaggttaagttacttgtgcaaggttacagggctaataagaagtggaggcaggatttgatgccagtgggtcattggtctaggattttatctaaggcaataggtagagttgggagtagggaacgaatgtatcccagggcaaggatataatctggacaaagataggctggcggggaggtgcaggatatgttcaggaggtggtctggataactgctgtgggatttggaggctggtgcaggaggcagcattctaagaaggatccgcaagtgaggtggagcataaaagggttgaaaaagttgctaggagaaagaaataaattctgtggttgggtcagaaactgggccaggggcatagatgaggctcattctctcattacactcaagataatgctgctactctcagaagccccaatagcctggagcctggcacttgttgttggctggcataggacccagcatgagcctcccaccagctgtgcagacaccaaggcatcccacaggttcttcaggtgttttctgggcataggcaccaaatccgatgccccatctctgttcagcagagttggggctcttgagaaaggctggtgtcagcatgccctgaaactccagtatagggctgacatgctgagcagcgataggcttgttgctattaactattccagccacactgactgccacaaaggctagttacaatgcaggagcaattgcttcacaggaaaaggcagcggctgtccagcacgagattctcactgctgtgaaaatagaaaataaaatgcactataggggacactcaaagaagtaaaatgttccccttggttgggagactgagttcaatagcaacacatctctcctaggttttcctgacactttaaaccatcatctcataccctctgcatttactcattgttttcctttattaaactccacgccaagggtgctttaggaaaacaaacttcatacatatgcagaactgcttttagggaatgtgtatattagaatagcttgccttgtgctcgatttgcttttgttggattattcctgtttaagcagagcaagcgtatttattctactgtgaaccatttaataattacatgcagtatctgagctccagggatgtacttgaaatacagttaagacattttcaaaaagagtataattttctcttagcttgcaatgagcaaaatacatttgaccaaacaaaataataataatagtaactcaaattgtaaaaaggtagaaaatacacatttaatcagcatcagtaatgtgcaaaacagatataactgatttgctgagagctatcaggatttagcatcacattttttcccttgctggcactcaaaaaatattgactgactggttgatagatgagtggcatacctttcaaccatgccaagatgttgagtggccttgacatctgtccattgtcaagctgcctgctgctctcaaggtctgcagcccacgttttgtcaataatcttgcagccctgctcattttaggtcaatgtttggtgatgcattgcagatctgtattccattactgtgctgttgtccataaaaatctctcttgcatagcatttctttgacaggtgttcactactgaaatgtcatccctgccattgacgatatttatgaagcattggggacgcagcatactctatctattaaaccctaaacagtgagagattctaggttagatgcaattcttggctgcagaaagtttactataaattcaggaagagagaagacatttattactcaagcaaacaaaatggagggaaggaagatggataaatggaggctgaagaacatttatctctttgtgagccaatgtgattgatagcattagttaaaccttcaaataagaaaggttttctgggattaacttttattttcttattaaaagtcatacttcattctgaagaaccccaagcaacaggccacaaaaaagtgtgagaaaaaaggccctctctggttggctattttcacactgatgtaagctgataccttaccctggtgatacttaatggtttgggagtagatgaacatctttcccttatgtctttatgaactaattctgaaacacctcctggataataaaatgcaaactgttttcaaagacatagtctttttcatgtgagctttaagactacctcatcagtcgatattagctcaaaggttactgcttgtaaccaaccctttctacatccaaaccagagcacagtgaaatccaacagcatttaatttttaaatttctagtcccctacctggattagaaaagtatttattatttaaatttttccttcagctaaaaggagtagatgtaatatagatttaggggttatggagaaaattataaagatggtaaaagaaagacctatatttgggtataattagttctactttgtaagctaatgtgtacatgccatatagagattttatggtactcagacggcaatcaataactcttttcttaagagagagaaatacagcacattatgtagacaaatgtaatattatgttaattgcttggtatggaatgagtgatccctgaatcagttcccttatctataaacagggactaaagctcccaccttgaaggcttgtactgcggattcaagacaggtatagagtgcttggtacagagcatggcacatggtaagcactccctaaccgacaaccaatagagttgtgaaattcagcaaagagatttctacaggagctaagtcaaagattattcaacgacaaagaaaagtaggagaatttatgctacaggagtaaatgtagcattcacccacctttctcagacatctgctctctcatttaagcttttgacagaaactggataacagtcagctcaaggttaaactctctgtcaagattctagtgcctgtgtttctgcattgctgattgaaaaaggagttatagccaaagataccttgtatgcatgaaacaaagttgatctattaggaaatttgaaatgtctagcatctggcctcagaaagatgaggagtctgctcacttctccagaaagcaatgggtgcttgccagcagactcagggacttccccagaggcagctttgctcattctcacctgtcacctattctaacctattctgcctgagctattcatttctcatctattctatcaagtaggctcttgaaaccccaaagtcttaccctgtagagctcattggacattagccagcaaacgtggtcgacgccaaactagccaggaagtctctgcatttcagttctaatatgtctaacactggagcttctttctccaaagccaagggtgaaaagactgcagctggccaccatgggtcttctgttgtctaagaatctgtagatgcagagagactggagaccagaagacaaagacagcctcatgtgcatgaacttagccaagttgcacactggcttgctgactaatctgtcttatctccttatctctgtgaatgcagatccctgaaacactgttgtagaaactggttgtcagaaacagaactaaggagtcaattgaaacaatcataggaccagtagccaggaaaggaagagaggtaaaaaaaaaaaaaaaaaaaaaaaaaaaaaaagacgaaaaaatatctccacatcaaaattatcctaaaatccactattccaaaatgcctgaaaaaaatacacctaaaaaaactaaaaatcaggatattaatttgtactatatgaaatcggttctatgaagcagtcttgaaaaagactttatcataagttatttttagtttgttcagagtgataaatgcatgggtgacatacattttaaagaaaactaaatgatggtggaaacataggcaaaaacaaaagcatggacatgaaaagaaccaattgcagctgaaaaatacagcctgtggaataaaatctcaataaatggtataaaatctagcctggatgcacttgaggagttaattatcgaattgaagataacagcctgtttatcaaaaacctacagcaaacattattcttcatggtgaagctttgatagcattctctaagtctgacaagatgtgggttctccctatcatccctttaattcaacactatgctacatttcatagctgatcaaatagttataaatctaagaaaaggtgtgagatcattaagaagaaaattataaaatttacaaaagaataaaggagtcctaaataaatagagtggcatactaagctcagggataagaagatggaacaatataaagatatcatatcaaattaatatattaattcattgcaatttcaattaaagtttcaatagattattcagtggaactagacaaaattgttttaaaattgatatggaaaaacaagtggccaaaatagaagaagacaagtaaggaggaggaaaaaaggagaaaaaagaggaagagaatgaagataaagaagaagaagatgaggttgaagttcagcaacaacagaacaacagcaagatgggaagctttgccgaccggataccaaaacattacacaaccataataatatgagattgtagggttagcatacagagagacaaaaagatcaagaaacagaatagagagtgcaaaaacagacaccacataaaaggaaccctaatatatgattaagatagcaataaaaacaataaggaaatgatggagtgaaggtattcaataaatgtgataactatgcacatggggagaaataggcacccacaccacatactgagcataaataaattccaggagaatgaaagacctaaatggatataaatcttttaggaaaaaataaagaaaaacatctttatgatcatgacatagggactgatttcttcccttttctccccaattgatttagaagtttattttgccaaggttaagggtcatgacccatgacacagcctcaggaggtcctgagaacaggtgcccaaggtggttgagtcagagcttgattttatatgttttagggagacataagacattaatcaatacatgtgaagtagacattggcttggtctggaaaggcaggacatcttgaagcaggggcttccaggttataggtagattcaaagattttctgattggcaattggttgaattattacctaaagacctggaatcaatagaaaggtgtgtctgggttaagataagggtttgtggagaccagggttctttttatgtagatgaatctcctaagtggccactcttagaggcaatagatgacagatgattcctgttcagacctttaaaaggtgctagactctcagctaatctctccaggattggaaaaagatctggaaagggcagaggattctctacagaatgtaaattagggatggatttcttaagccactaaaccacatggaaaaataaatgattaataaagctggctacattaaaattaaacacttttgtacaaaaaaaaaagtcacaataaataaatttggaagacaagccacagactagaagacgtgcagcaaattttatggaaaaaaaggcttaatatagaaaatttgtaaagaacagctacaaatcaatgaaaaataaataaatacccttgtagaagaaatgggccaaggttattaacaggaaattcacagaaaagaaaatctaagccaaatagcctatgaaaagattaccttgctagtgatgaggaaatgcaaaatgaaacaataacataccatttcacaccaactggactagcaaaaatggtaacattcaacaatgatcaatgttgaaaaggattgagcaacaggattgctcacaccttgaaggaggtagtacatagccatataacctgttttaaatcctacaagaagacctcagagaaactattccttatgggtacatggaaataataaacaagaatgtttcttttcaaattatttgtaatagcaagcaaattgcaaacaaattaaatacctatcattagaagtataaataaataaatcacagcatatttataaatggactactacacagcactaaaaatggatgaactagaattcacaagttaacttcagaaaatgtagcaaatgaagccaattttacatagatcatacactaggaaattttatacagtttgaaacatgcaaagagtgacatgtatgcttatgcatacctgattataagttcataaaaatgttctgaacagcaaatttagtacacttgttacctctgaggaagcaaagaggggaaggaatggcatcagagagggcctcaaattgtatctgtaaagatttatgttgtttcttggcgcggagggggttgttttttgttttttgagacagagtctcactctgtcgcccaggctggagtgcagtggctccgtctcggctcactgtgacctccgcctctctggttcatgcgattctcctgcctcagcctcctgagtagctgagattacaggcacgcgccaccacgcctggctaatttttgtatttttagtagagacagggtttcaccatgttggtcaggctggtctcaaactcctgacctcgtgatctacccacctcagcctcccaaagtgctgggattacaggcgtgagccacagcgcccagccttttatttttatttgagacagtctcattctgtcacccaggctggagtgcagtggcgtaatcttggcacactgtaacctccgactcctaggttcaagcaattctcatgtctcagcctcccgagtagctagaactacagagacaggccaccatacctggctaatttttttgtgtttttagtagagacggggtttccaggctggtcttgaactcctgatctcaagcaatacgcccaccttggcctcccaaagtgctgggattacaggagtgagccaccacacccagcctataaagaattatgtttttctaaaaataatccaaagtaagaaaaatgtttggctttgatagacttggatggtggctatatgagagtcatcatactattcactgaaattgtctatatttttttaaatatttcataatttcacatatttaaataataagcctgagccaaaatggaaaccccaaagtgtcagacaggcccattcaccattaaaagacccacttctacacaccagcctcaaagtgcgcattaaataaacgaatgccaaaagtccatcatgcaccctgcacacacctagtgagagggtaggggaattcgaccactagacaaggcagccattttttttctgttcatcaaagactgctttgtactgatccttgtcacccaacatctctttttgtgggatccttcaaattagtttatgtcacttattattagaatttatccttccaaaacagtttatcgagtaggatctaataaaattataggaataatcaataggaataagattaaaatgtgctagttcatgttatcctagtagctgtaacaaataaatcttggccctgaaatattagtggcttagcggcttagcaccaaaagaagtgtatcactcacccaccagtccatctctgtgttcctggtggagcagctctcctctaagcagtgattaggggatgcagactcctttcatctttggcataggtttccaatgttcctgggcttttttgcatcaaactacttgaggggaaagagagtgaataattgcccaagggtaatttttatgggccaggttaacaaatagcatttacccatctgctcacatatttgccataactcagtcacatggccacatacaagtgcaagggaggatgggagccttactgcagcctggggagaaaagagaatgactggtgaccatttagcattttctgccaccaacaaaaaccatgttacagagtgagagacaatactgtaccagaatacctagttgaatggtgatatggtttgactctgtgtctccactgaaatctcatcttgaattgtaattgccataatccccatgtgtcaagggcaagaccaggtggaggtaactgaatcatggggtcagtttcccccatgcggttctcatgataatgagtgagtcttacaagatctgatggttttataagcatctggcatttcccctgctggcactcatttactccttcctgccaccctgtgaagaggtgccttccaccatgattttaagtttcctaaggcctcccaagcaatgctgaactgtaagtcaattaaccctctttcctttataaattacccagtctctggtatttcttcatagcagtgtgaaaacagactaatatgggtattagcaaatgactgaactaagaaaccagcaaaagcagatttaattacttagttactttttgttttagtcatggttctccagagaacagaaccagtaggatgtgtatacatataaaaagaggttcattataaggaattggctcacctaagtctggagactggcaagtccaaaatctgcagggtgagccagcaggctggagaccctgagagccaatggtccagcttgagtctgaaggtagcctgctatagaaccaggaagatccaacgttacaggtgaagtccaaagacagtcttccagagaattctctcttctcagagaaggccagatcttttgtctatttaaaccttcaagtgattggatgaggcccacgcacattatggaggacaagctgctctagtcaatgtccacaaattgaaatgtgagtctcatccaaaatacccttgcagcaacacctagaataatgtctgactgaatgtctggatacctcgtggcccagccatattgacaaatgaaattaaccgttacaattttaatctgcatgtttctaataggattacatgatagttaaagatcatggttaagagcagggctttggaagcagcagacctgagtttgaattcttgtcctgcctcctatttgagaagtgacttcacatctatctaagcttcagttttctcatctttaaaatggggataataataggctgttgtgaggatttaataggataatacatgtaactctctcagcacagggcccatctcatagtaggtgctggtaaaagaggttgttttattcatattgctggatatatctaacactattccctaagtgtagtacatatataaatacatgcttttggctggaaaaactaagtgagatgatcaaatcactctgatggaaaagccagcagtgtggatggaaaaggtgtgcctgttctttctctcaggaaatccacagggttgcgcacagggcctcaggttttcatttggacaccccagcagcccctcaatacaggctattcacaaaagccccaatacagtcaccctgacagtccagctgtgaaccctggctccccacacgtgagccatggtgtccctctagccttgttcattcattgtgtcagtaatctactgccatgataacgctgcataacaaattattccagaattcagtagcttgaaacaataagcattgattattgctcccaagtctatagtttggctggaaagttctattgatctggaccaggctaggcttgtcttggctgagctcacccttgtctccctggtcagctggcaggttgctgggggctgattggtttaggatgacctcactcacatgttgatggattactgttgactggggtgtcaggcattacaggttatgtgtctttcatcatccaataggctagcccgggcttactcacatggagcctagacagggtggcaagagaaagcagaaaagccacatggtctcctgaggcccaggctcatcacttctgccacattctttcagtcaaaataaatgacaagagaagtccagattcaaaagcccagggttgtgagaaggcttggtgttaggaacaatcgtaagaaacctctatttatggctgattgctaattagtgttgcctaatttagcaatgaaatgtttcttcccatatgttcctctggagagcccatggcattcctctcccccgcttaagggccaaaattaagatacagaagacttatttaatatctttactttgttcaagctggttcacatacacttgtcctccagcctttggtgaactgttttaggacagggacaggtttaacacaagggccgacctctgcagtgacactgggtttacatatctgggtacatgataggcgggtttcattcttgttccaaagagaattttgaggcatgaaatatgtagcctttatggaggcaggatttactttgactcatacagagaaagaaaatgtgtgtgtgtgtgtgtgtattttcaatccttgcatgtgatatttttaagggctggtgcgatagctttgcttgccccaagaggatgtcccagacagtgcactagttgatgctgcagaaatggaaaattcctagggatatgtagccaatgaaccccttcacccacatttcctgattgtttgccacaatttgaacagtgagtggaaagaccttgtgcattccgcaggccatactcgcactgtcccagcagacctgggaatgtgcccatttgattcagtagttgttccacccaccattaaaatggacttttctagccacactcagcagctcacagctgtaatcccagcaatgtgggaggcttagatgggaagatcgcttgagcccaggagtttgagaccagcctgggcaacatgggaaacccccttctctacaaaaaatacaaaaaattagccaggcgtggtgcacacacctgtggtcccagctactgaagaggctgaggcaagagaatcacctgagcccaggaagtcgaagctgcagtaagccaagattgcaccactgcattccagcctgggtgaccgaggagactctgtctcaaaaaaaaaaaaaaaaaaaaaaaaaaaaaaaagaataaataaatataaataaagtggacttttcatggttggatctggtagttccagatgatttgtaccattggaatcttttgcatcttgaatgctgtttgggtctgaaaacacagccttctcagtgattcagcttatacttgttttatttctctattgcggctttacaaaccaccccaaaatggggcgctttacagaaaactaaaagacaggtagataatggtttgctcagcactttaagtcttcacagaactttaacacaagggctgacctcttcagtgacacagggtttacttgtatatgatacgcagatttcatttttgttccaaagagaattttgagcccatgagagatctagccaaattcgtttcactgcatatctaatgtgtctttatatttttccaaagccacgggacccgatgtgcaggagaagtttctgctgccgccaacaacaatatctgtggagttggagtagcatacaactccaaggttgcaggtaagccatccctgccaaacagaggcccccactaggtatcacactgatctcaaggctgactgtggcccagcaaaaaatcccactggtgcagaaaagctaggatccacagatttggcacaagtgaaaaaaatttttttcttttaacctgcataacaatatcaatagttttaaatttttaatttaagcataatataaattcaaaaaagttaacaaatcataaataagctaatgacttttcccaaactggccatacccatacagtgatcaggaaacaaaatgtaaccagcaccccaaacatgtccccttccagttactactctgacacccaagaataatcatgatcttgttttttaacagcaaaaaaaaaatggttattgccagtttttgaaatttatataaatagaattgtcagtcactactcttctgtgtcagtgtcaataacattttaatgagtctcaaatatagactatagaatacaaggtggtgtgtataaattatttgtaaacatactcagagctcttcaaaatgttttgcacaatggaactcatctttaaaaagagaaattctgcctagaacctttttcttacatttcattgggtaggatatttaagaatttcctattgatggagcctttagaaataagagtggcaagtcactggaaatttagaacccaatatccctcccctctcagaaaaaaaaagagagagagacacagacagagacagagactgagagattcataagctttcaacgagatgtctgagaatggagtggcaccagtctttttccaagttttgcatcaaattgattcttaatttattcaggctgagtcacccaaccttgtttttcttttttcttttcttttttgtttacaactgtcctgatattttcttttcctggcaatttaatggaaccataaacctactttctgctgacactccatttccatggaactaaataaagcaaaggtaacctatacaaacccactattaacctcttttcaacactgtttgctaagaggcttgcctgaactgggtgctgaatgtcacaaaagaatacatctggaggtttctaaaatgtaaatagaggaggcttagcccctgggtttcagctctctttactttgtgcacatccaaaatgctggcattaaaatgtcaggagccattatgagctcaggggaaagaatatcactcggttaatattttataagccaggctcagacctgggatggaatctaagggaggcgggttctctactcacaggacagaactggaagcaactgaaaaattcaaacctgaatttcttgttcacacacccaaggtaactggtttttggaacaaagtaaaatgaccacctgcaaaagttaaaagagttagggggagctcacagctttctggaggttcctgggagcttctttttccatctccttcttttccttttttcctcttctcttattatttgcactctgaaaacacctgagcattgagtgctcatcaaatgtatctaattctcctgctgtcttagtttgctctgcctaaaagcaaaacctgagacaaggattccgggcaagcagttaatgtgggaggtggtccccggaagccagagtgagggagttggggaagaagacaggaaaggaatggaggccaacgaagtgagtctcatggacaacaggggccccgtcctgcaggtaattctctgaggaagtgtggagaacacccctcagaattgaccccgctaatgtgaggaggctgcggcattaatctgccagttcccatctttcattgttcgggggtgccgtcgggcctgtccagcctgcccagctcgcttgaactgagtggagctccttgagcagaggacacccccaggcaaaaagccagggagcaggccagaggacccggtgggtgcagcagcctctgcctcgcctgctgaatgcagcctgacacctcaaagacgcgactgggcttctgtgaagcccaatgacagctagggcatcacagcaacgttttgaggttccagaaaccaagaacagacatccaaagattttgagcaagggaggctcctttctttcttttcccactcccttagccccagcttggctcccctgtgaccacgtacgctggttctaactacaagggctgcgaggctccagtcccatgcctgtgccttagggaacccagtgtcctctggctccctggggcgtcagcatgaattcttgaggaagcactggggaattactcatggattacaaaaacagcagagtttatcttacaaatttaaggaaaacattttattcatcctggctggcaattccaaaagttggctggtttttaattatttgctaaaaatgagccaaaccctccagagaatctttccattcgggagctttctgggctaaggaggtctaaagcgccacctggtggccaactcggatcgttgctggtctcaaagtcgaggtgttcgttcgttacaggttaggggggcgcccctgtgatgtctgaggtccttccccagcacccctccacgctgtctccagaaaaagcccaaagttaaaatgtggttgaatcttaacccagggattcaaaaaagaagagtggagattgtaaattgagtcctctgaacagaagagagcattgagcatctctgcatctacctgagttcctcttctgttcataaatttttctcatttttccatcaaggctcctgtctttttcttgttgatttgtaggcattcttggtgtgtcccaaaggttagcccctaacccattttaatcaatgcaaagatcttctccttcatttctcttcgcgtccgtcttcatttcaaactccgtgacatgtagacccgcacatacgggatgtcccaaaagtcatcctgcagtcttcaagctttaataaccccaggaacattatttgaaagtttatttacatttccattttcactgatttaattgtataaattttgaagaaaaatattactttttttattttgaaaatgcctttattcaagtaactgtcttttttaaaaaggaccccattctttccttctttcttttttcattttaatttttaagtaaacaacatcttcaatcaaaaagattgagtcaaaaattaaaattaagtgtgttattcaaaatccacaaaaccaagcaaatgtaccacaaacaatgaccttccaaatgatggtttttgcaaatttgtcaaatgtatatttctgaaaatattaaagctcgagaccacatcaaggagtcgtaacactgtctcctgccttcaggccttttgtgtggtccatagttactgtgggcaccttcctgttgcaggggatggaagctggcggacaggtcccctgccccatatagctcacagtctaggaggagaaaaagacagggagcaaataaaaaaaaatcagataacaactcatgaaagaggacagagagtaaccagggctcagggacaagaggcgcctgagggtggggctctacagttcctcactgttctggatttctgcagagactctcagagcagccctaagagggggccaggccaggtgggtttggtcctattcaccttcctttttaaaccaaagcacacagatttacacaccgggcttcgggatgagatcacctttgattgaagattttgaaaaatatttaaaaaccacactgttgaccattgtgaaaatgccgtgaaatttctctaccagctatgaagtgctttcacatattattatcactattattattggccaatgaatctcataacactgcagataaacatattttatctgagcttttcaataaacaagtaaaaatcactgtaagtacaatgactaacatgagttttcagaacctaaaacctggatgagcatgaatttcctccttatcatccagagctaatattcatgagcacaaaaagtggcattgatgagcaccgaagtttgtgggcagatgtagtatttactggaggcagggacaggcacaccttgtgcaacaggagcagaggcagagagggtgcagctcaaatcccctggacatgcagcccccggggcaccagggctagccacagtgcatgctgcacaggcagacagagaaggctctaaatgaatggaagagacccacagagtcacctctactcattaatgtgctgtgcaggcctgcctggggtcagatagaaacacttgatgtgtgcctgtgtctgttcttgcccatcaaatacacatatcagcattgttagggatgtgaagacacagactcctagctcctttgatttctctctctctctctctctctctctctccccccacttccttccctcctcctcctcccccccttcctccctctctccctctctctcttcctcccctcctcctcccccccccttcctacttctctccctttcctctctctttccctctcctctccctctctctctaccttctctctcctacactctccctctctccctctcctctctccctgtcctctccctctctctctaccttctctctctctcctacactctccctctctccctctcctctctctctgtcctctccttctctctctaccttctctctctctcccactctctccttctcctctccctttctctctacctgttctccctctgcctctctctatcccattctctttgtctctctccctctatctacgctctctctctctctctctcccagtctgtctgcctctctccctctctctctccttctctccctctctctcactcggtctactctctgtctccaccccacattcccctgtagctcctagagcatccaggggcagaggagaggccttccctaaaaacccttgggtcacgctgagcctctgtcttggcttggtgcagttgcttgcaaaattaatactgtatctcattcaattaatgcatgcctcattcctcttgagcttaacaagattaaaagaatgtcgggtgcctggtccctgaatatgaatgagagacttgctctcagcctgtggccaccctataatgttaaaacagtcagaagattaatacacatccactctgaggttcttgcgcagcacagagggagcccatgaaggtgataagagctgcaaagaggaagagggttcaaggcacagctggaagtgccatgcaccagccctggcaaaatccagggctggcattcgttggtttgtggggcagcagaaacctgctttggccggggttgaatttctcaccttccagttgagtgggccattcagtcctggtcatcttggcactaggcaagttcaagagcatctgagcaagtgaacgccagcctctgtctatttcccacccacagagtgggcgtgactttgcacaagaagaagctgcactgaccagtttattctgtggttcattggtcacctgcattaaataaagtttttaaataaataaaaacataggtggaccaaaagcaaaatacagagtcttaaatttcctatctccttataaaatgaaccataaaatttaacatctggaaagttcaaaccaaagactaggcttattctagataatcttcctccaggagaaagaatgctaactgataactgggtgtttgttgtcaaaaatggtgattacacttatgggttaatagtagaagatggataagcagagcctgttattcattcttctggacctgttatttgtgttggggagaaaatcaactaaataaggtaataatgccagatatttattcaccaaatatttgtcaagcttaaaataaataccaagcatcatgttgatcctcaaggacatggaagtgaacaaaatagacacatgccctatactcaaagaccatgccatctggtggtatatgaaacacgcaaataagtagttgcgatagaaggttaaaggtacacaagaagagggctatgagcactgaagaggaaagtgagatcctcgagtctcctgaggactgaaagtagtagtccctcaggaaagaaagcaatttcatgtccatttcagctgcctggcaaggacctgggtggcttttaattcgattgacgtgctcgccatgttagagagtgaggcttgtgaaatagtgtccttcaggcacaacatcctttggccaccggggacaaggaaggagttttggggcccagattttgactgtgcatggcccaaccccttcattccataatcgcagtgggtggaaagactcaggtcagcttcactagcactctaagctccatgccacagaattgtgaacccactgacccatccagatgacaaagcctggagagaggcatgtgaccccgtcagcgaagttttgagggtagtgatggagagacagcacacccaacccaatggcggctactgagatccccctggagaggcctttgtggatggccaaacggggaccggaggcctaggagcaccagctctgcgggggcagcgccagcaccttcaccctgtgcccctgtgtcttaggattgtgtgtcccacactatcctggactgcaggactttgctccttcccaacattctgtgagaaatcactcccacgaggcatcagagaggaacacaaactttacagcgatgctatagggaagaaaggagaggcagccgtcagacacagaattactaatacagtttagaatagccatctctgcctttctgtcctctccgaagtccctctcagctacagtgcaaatgggagttcctctttcctgaccccacccgctcctgcactgcccctgcccctctctctgtcccctgccctctgccctctgcctgctggaatttctcctcaaatatcaaatattgattgcctcccccatctatcatatgtagtagctttatttctcccttaaaacttggctgcagccaacacccagttctctgaggccaagcttctacttagaaacgagcttatcaaagcatcgcttcagcaaaggtggtctctcccatcatgaattctagtaagttttgctaggggaataaaattgtctttaaatcattacatcagcaaagatgtgggtgggatgcagaaaggagccagtaggaccgtctgtgcctctttcttgatccctggactgcacagtggccccagagcacctgagatctccaaccattccaagtacccagggcccaagccctcctccacctccttgtctcctgcgaactggggaacccaaacatggtgtcctctgctcaacgtgtccacaggcatccggatgctggaccagccattcatgacagacatcatcgaggcctcctccatcagtcatatgccacagctgattgacatctacagcgccagctggggccccacagacaacggcaagacagtggatgggccccgggagctcacgctgcaggccatggccgatggcgtgaacaaggtaagggggccggccccctaggccccggccactcacaagttgggacaaagtgggtggaggggtagatgcaactgggtgaaccactgtcaccctgtgtgtgagtccaggtcctgcaggaatcagacagcacaggggcttagccatgcaggaggctgactgcagggaggcctgtgatggataaggagagagggcagaaaagcctcagacgcgatgcctacctggctcctgcaaacgacagtgggaaggaaggggccgggggggggagggtctcagacagcagtccccacgccaaagctgcccatcacagacagaaaggggcctgcactggcacccccaccacccactcagtcgttggctggcagtagcacacaggattttgggtctcggcgcacacagggcggtagatccaggaggcagcagccaagactatgaccacaatgctcgtggggcagggggtctgagcatgcattctcacagctgctcctctgagattagcccaggcttggacagagctgaggagaaggaagctgggcagagcctccaaagggatgagatgcaggtcagtgctgcatagggaggggaagggggccccttctctgagacgctggggctggagccaccccagaggagacatgaccccaggctcagggaccagaggatttctgggctccagtctatcaggaagtgacttagcctcgcctgtaaaacggtgataatgaggggtcactatgatgtataaatgagataaagatgcaactgctcggcactgagaagtgcctgcaaagagtcagaatttgtcccagtctcgactgccgcttaagcaaccaccccaaaacttcatagcacagaacacaactcctttactacgcttgggatgctctgggtcaggaatttggaccgggcacactggggatggctcatccgtcctccatgattcctggggcctcagccgatagattcgttacttgagcatccattaccaaactgttgcgtcttcatgagctgttctgatgcatccatctacttgccacgcgtggcacagctcccacccctaggcttacgcagtcttctcaggcctgtcctggctgccaggccagcagttcccccccacccacaccgtgctcccagaggactctctgtaatcagcctggacgtgggactcacaccacaaggtcactgccgtgtgtggagtgagttgtctggtgttaagtgagggaaaggacagtgtgtgagattttgtgtgtggcttttggaactccattttgggaatgtttttaaatttgcttcttagattttggtaaatttcaaatagatgaaatggctatagaaaccagcactattataaatattttataaaatgcatctgctccacatacacatttaagttatgtacagtctgtttatggaaaatgcataaactcattacttatacattgataacactaaaataagtgaatgtacagaacgctatgtttaacgcaggcataaaaaagagaatattgaagaaaataagagtgggcaattgaaggctgcttttccatacatttcttgaggtcagaaaacatgtgttttcctgcccagaccatcctcaggaactggcccggggtttgagaacatagtggatgagctgttcagggggcaggtatggaattaatgcagacacgaaatggtacggttgagaggctgaaagtcacatcgaaatctatgactacaatggatgccattggtgcccaccaagatcccctttaccaggcctgggggccaccccagctgctgtgagtgttggctgctgatggctcacagtgggccctctcacgaagcattgccttgacgatggaatcttctctcccagaaagttatgccccccacacccagggcacagcccacagccgatgactaaggcaggagcctgtttgcctccaacagggaggagtcttcaatgcaatttatggtccagagccccctgtgggccaggccaagggaaagctttacccaagactacatagttttggagttccttcccctctgtatcttacttcacttccttgctcgcaggttgctcctgagagccctccctcaatgagtctggggcagccgaatctctgcctcaggctctgcttctagggaacacctcccacaaacactgcctcaaaatttaccccattaggtttccctttttcctttggctgccaggaagcttagaactaagtgtgtgcctattaccattggttttttagactaggttttcttctaccttttttttttcttttgagatagggtctcactgcatcacccaggctggagtgcagtggcacaatctcagctcactgcagcctcaacctcctgggctcaagtgattctcctgcctcagcctccagagtggctgggactacaggtgcatgataccatgcccagctaactttttgtagacatgtttcaccatgttgcccaggctagtttcaaactccgggactcaagagatcctcccaccttggcctcccgaggtgggattacaagcatgcaccactgcacccggcctcttccaccccatttttctccatctcttcaccactcacagcctccaaaatcatcccttagcttctgtccctgtgtccgtgtttgtattcctagtgagtctaagcctctgaatgctaggcaatgtaaaatttgtaaaagaattgatgaaatgagctcagtctgattagattatatttagccatgagaaatctaactttggatccttactaaattgttgcttgcttacacacattcctagtcttaccagactaaagcatctcactggacaaaaattggcaagttcacatgtaacttcctcagagtctcagccctaaacaatagtaaacaatatttcaaaccaagtggaacccttcagcgcagtgggtggccaactttggtacacaggctggatctaacccccagacttgctttgcaaagacagtttccttgggacacagccaggcccttccaggtctttgtgacattctgggcacctccaaccacagctgtcacgggtcccaggggaaggaagcacatagggcaccaaatgaaggggctcatctctcagaatcaggcttttctggatgctggtcaacgtctctgtcttcactagagagccgacactgcacagcagcaggtccgtcctgttgcagggatatttcagcaggtggagagctcttgacagtggagagacctgagttttaacctcagtcctgccccccattggctggggaacttcagactagtcgatgtctccattcctcactttttgcaaaatggtctgagtcagtgcttctcaaagtgtggccacagcccacctgggagagtgaaaaatgcaaaacctcagcgcctcctcccctcccacagatgccgcattttaacaagatcccattaaagtttgcaaggtgttgctctacgtgatcttgaggatccaaatcatctaaccctgagatcctaagaccctaacatatggtttcttaaaacctacaatgaatagaaaagggcagcaggggtgacacatttccagaaaggaacagccctgtatttcctcatcagacaatgggttggacgggtgggctgtgtgatgactgagccacacgccatttgtctctgtgttgaagaaacagaggcctaggtagcccaaataaattggtttctcgtaagaatgcaccaggagggccttggcatagtggctcacgcctgtaatcccaacactttggggggctaaggcgggtggatcacctgaggtcaggagttcaagaccagcctgatcaaaatggtgaaaccccgtctctactaaagatacaaaaaattagccaggtgtggtggtgggcacctgtaatctcagttactcaagaggctgaggcaggagaatcacttgaacccgggaggcagacgttgcagtgagctgagttcatgccattgcactccagtctgggcatcaggagtgaaactctatctcaaaaaaaaaaaaaaaaatgcaccaagagggatcagggcaatgagatagattcaggcaagacctcatagtgcctgggaccagacagacatcctgatccaaggtggctgcaggatgccagccccaagaatgtgtggaaagccacaggagggctctgcggtcacggggctaggccacactcaccctgtttgcttctccccggtttcgtggctccggctctccaactcacccttccccttccttgaggcttatgcttagaggtgtttccacttggacaccaccccattggcacccttgcttgttacaatctgtcagcctctgctccagctgccacctgcccttgatgctttcagggaaattttggctcaaaattaggggaaacaccccaagatgagcctccaaaaccaagaagtgtggttctgttgggaaggtttggaacttgcagggtcagaggccagtcagatggtttctaataaaacccctttctttctcctctgaggacatcaaagggtagttgtctatattcacagtcttcttaggcatctgatggagtaattttttctgagctgttgaattctttcaaaggtctgaacagaaatataagactgtatgcccctgtattaatctgttttcatgctgttggtaaagacatacctaaggctgggcaatttacaaaagaaagaggtttattggacttacagttccacatagctggggagacctcacaatcatggtggaaggtgaaaggcatgtcttacctggtggcagacaagagaagagagcttctgtagggaaactcccctttttaaaaccatgagatctcatgagatctcataagacttattcactatcaagagaacagcatggggaagactcgcccccatgattcagttacctcccactgggtccttcccacaacatgtggaaattcaagatgagatttgggtgggggcacagccaaacggcatcagcacctcttctgttgtgggttcaattgtgtccccaaatattcatatgttggggtcctaatccccaatacctcataatgtgaccttatttggaaatagggtcattgcagatataattaattaagatgatgtcatattggagtaggatgggcccctaatccaatatgattggtgtccttatttaaaagacaaaaaaaaaaaaaaagaacaggaacatctgggcacagataggcatacagggagaacagcatgtgaagatgaaggcagaggggctggggatgcatctacaagcccaggagagccagagatggccaacagcccaccgggagctgggaaaggaatgggatagattccttctccagaacttctaggaatggaattgaatctattatgtctccagaacttctagagatggattctattcctagaagttctggagacggaagtgtcagcagggttggctgacacttccgtctccaggatttctaggcaagaaatttctgttgtttaagccactcagtttgtggtcctttggttgttactttggtcctttggttgtggtccttctgtagcagccctggcaaactaatgcaccttccagtcttagaatggatcatcaaaaaggaggtttggcagtgcgggaatgacctgctcactgttcaaggtcaccttgatgtcacctggccctctgctttacagccaagatggtcaatagttgatccaattacgacttttttcttctagttcaggaccttgagaagtctccctccctcccttctctgatgtagcttcctcgaaggaatgagcgtgtgaaaatgctcacgatgcagtcctaggagagaaacatgtttccaagttagggagagtgctgtgctgaaatgctcccaataacgtcacactgggagcttgaaattcaacatggaaattgacgaacactaaaaataaagcccttttacgcccccttcagggagctggttgttaaacattgaatagcacacctctcgttagaggactcttctgacttcccttaaattatagcacttacatacctatgtgttctccctgcaagtaacagccacccttgccttcatgagtctggaagttccctttgcgaagtggaaaagctggaggaaaaacacctgaaaccccaaggttttgtttccccaaaatgacaagtttcccaaccagagtcctaagttaccccaagactgtggaggacaacttttctaagtcaaggaaagatctcacactttaaggaattcaccacttttacattaaatacaaggatcccaaaaacacaattatgagatgggaaacagagtcctcgaagtgaacatcatggtgacagcagctaaatgtccattgctacactgttcaggaaatagtgaagacgctttattacaaggttatgccagtctgctgttgaaattcaacccatctgaaacagcaacaggagcctgacatttgagtgacacaatgcggtttacagagaatgtctgccaacaggatcgggtggcaggaaagtgacgtccctaccctgtttcaatgcctggtctccttaagaagcatttaggatgaaatttttgatgcacagacagcctgtttccttattgcattattcattgtgtgactggagagaaattgttacacatccaagccccagaccaggtgacagcaggtgcccaggggaacagttggcagattccccctttcctcagcagacatggattttcactgagaggcactttttttgacacctgaggccaaaagagagtcgggaaggtaggagatgtgtgccctctgtccagactgacagtgcagatggtggcagcgctccacatccctgggtgcccctgtcattttccacggacttctgcacttctccactgcctctcgaagcaggatatttctctctcctccatctgtagcctccctggctgcaggtgaaaaggccctttcaagtgtgattgtcctgcaaagcatgccgagcccgctgaagcttaagagaaaaattgttatgactgatcttcagatgacagcaagtacatcttttagaaagtggagtgagtatgatgaaaaatacattatttcacatttgacttttccccaagaaatgggaataaatttccccaagcaatgggaataaatttccccaagcagtgggaataaatctttccttgtttcaaggtgacattttttggacaacattgtagcattttggaagtgagggttcattgtgcattagcgaaggttttctcctagtgacttccactgcctggtctactctaaggaaaaatccacttctgaaaggcaatcttcacacaaacaaaggagtcagagaattacctgttacacaaggcacttcttacgtttgtctttcaattttatcatcctgtacatatgttttgtttgaccaacatggtaatgattaaaaggaagagaacaaagaggagatggataagagacttttatcggggcatgcactgtttgccatagatcccaccattcccagttgtctgatggctgcttcacacaaacatcacctacctgactccttagggatttgaagtttgcacctcctacatttgcttagtaaatacttgagagaagcagtgaggagtgggcaagaaggaaatcctttttttcttttgcttagtagtctatgtgttgggtttacagttacagcatttttcacgttgtatatgggaagagggtgacagtcagaggcccctgaattaccagagggttcaataattgacttctgtcttagttttagatctcctagaagcagatcctgaggcaagatttgggatcaagtagtttattgggaaggtgaagagaataccagtgatgaatgggaggtgtggcaggaaagagacagggccagttaagggtatgttatcctgccagtcatcgctgtcagcaactggagcttaatgccactgggaaacttcagaaaaccacaccaaaacttgagaacacaccccaaaggtatcccaccctgtgggaaaggagctggaataaaacccattgatgaggtttgttcccaaaaccttgtaaatgccccagtgctttcagcctgaggacagatgcacagagcagcctttcagcctcttgggaggaagcccttagacaaaaagatgcatatgctgacatttggaaactcccaggcacagggaattctaaagcccaagggatatgggctcacacacaactcccaaagtgcagcttaagcaaaacctaacctgagacttcgagtcatcactctctggataaataaagcactggcaaggtgatgtgtttactgttcaggaaaaggatgtagcccttgcaaagagggagctacaaaaaccagccattatgggacacagcatcttattttgctctgacaaccagaaggggaattcgggtgacgctagaaggtcttgaaagtgacaactgattcatgaacgtctttccacaacttgaggaaatgcagccacccagggcaaccctggcacaccttttgctggctctgatgactacatcccaacttcttcttaatcactcttcagagttgctgctggagggaatattttaggaatatttaaagacaaggctacaaaaattctctaaggtacagatgagacagcgcattgattgtttactccctaaggggctgcaaagggcaaagcacagaactcaggtcttcttccagctggaatgtatggacagggaccacttacaagaaaaccaccatccaggaaagcaggggacagagagctgcctggggagacagtgattaatcaggcatgggcgaggggaggccacagtgcctcctgctgaaatttaatcagagccacgggtcgtacaccatggcggcgagtgccagggcctctggcagacgatgaatgcctcctgccaaggagctctcacgaatactctgtgagcccagatttatgctctgcagccagatgaaggtcgcaactgagcagaactgctgcagcgtggaatctgcagttcagccttggaaacagctggtgccgttaccgtccttcctttcatttctgggataaagagaactaagagaaaagtctggtgggtttcgggtgatccttgtgaccagccgtctcattttgccagggactttcctgtttttagcattgaaaagtcctacatctcaggaaacccctcaatcctgggcaaaccaagacagttggtcacccaccctttggcgctattagtagcgttggcccacctgggcccagtgagaaattcacccgaggttagaagttgacatgaatgtaaactcagcagcacctctgacatcagaaagattcatcactacaatggctggatcctttgagcagtgagacagaataacacaggattctgacctccaaggtggttacacgaaaaccagacaataactaaagacaaccacaggcgccatcaaacactgaatcgaggtgaggatttaaatcagaggccagggcaactgcatcatccttagcttggcttttccagagaacctgataccctactcccgctgaactaccacagaacccacagggactctgcagagtctggaactgaccagtgaaagttccaaactacaaaggataccatctatcatcactcccactcacaactcattgattaaaatggcttataagacctcacccaaccacaaagaggcctggtcatgggctcagaccgtggacagtttgcaatatttagcaagcagcagcaatgactaccacaatgtgtaccgaaacagttaggtagctcaagaggtaaccagttgacctagtgaggacaaatgtgcaaatgtcgaagatgtttgtgaatagtttgaataaaatttgccaaagatgttcatgaataatttgaataaaatttttcatgaactacgagtgcagaaaggcaatattcataaatcaatacattgtttcatgtgcaatttaaaatgtgtttattttaaaattcatattttaataacagattaaagtaatataatggaaaagtgtctgcaagtctaaatccaacacatcaaagaaaaaggaaaaactgagtaaatatatatgcacatagataatgaaaatctagctcagtttcttaatacaggaagagctcttacaaaccaataaaaggaataccatgaggtcaggcgaggtggctcacacctgtaatcccagcattttgggaggctgttgtgggcagatcccttgaggtcaggagtttgggaccagcctggccaacatggtgaaactccgtcatctctactaaaaaaaataaataaagaaaaataaaaattggctgggcacagtgctatgtgcctgtaatcccagctacttgggaggctgaggcaggagaatatcttgaagctgggaggcaaagactgcaataagtcgagatcacaccattgcactccagcctgggtgacagagctatactctgtctcaaaaaaaaaaaaaaatctatgaaagaaaaaaacataggcaaagcatattatcttttggggcttggggctttgctaaataataaagcaagaatacaaatgagcaggaaagacacaaaaagataaattcaactttagtgaaaaaatatataactcaaaacaataaggtactatttttacccaccaaattggcaaaactatttttaagaaatgacaattctaaattatgacgcatatgagctgaatatagagttctcatgcactgctggtaaacatataaactgttaacaaactttatcaagaacaataatatggcagatggactaagaatcgtcattcattttttttcacccagaatttcctcttttagaaacactgcctaagaaaataaacatacaaagacatatataagattatgttcattttaaacataaagcacttttttaaaaactagagacagcattccatgtacattcaagaagaggtgtaaataaattgcggaatggctatttcataaaactaataaaaaattatggtgtagaagagtatttaatcacataaaaaaagtcaattatataaattgtgagaaatacattttaagcaggccaagaaagttgatctatttttattatcccaatttcactttcaagcccgttcttatactttgcatttatatgtaaaattggcaagaatccacaaaatatcaccagtgattatctattcatgtaagattataaaggacttttatttccttcatcttctatattccaattattctataataaatattattttcatagtaaagaatacaataactttttccaaggtatgctaatgttgtattaagaaattaaggtgactggaaaataaaaattactataattgtttacaaaaagataagctctcccaggcttgcctcaccaggggtctgcaccctgcacccataccaaccccagaccagcacctgttctggtcattaaccctggtggctacccattggttagggtggagggactgactcactttagccacaagtttctcagagtgggatttccacctcctcaaatgtaggcaatgcgctggggacacagcaagccactgcaccagtctctagctggaatgtcaccttagctgacggtaagcaatttgtaacattctttttatattatgagcaaaataaaaaaattgcttgaatgtttcagaaattttgggcttgtgagaggctacttaaggccatgcccagcaagttccaactcactgctctcactgagcagggtttctcagcctgggcatatggacattctgggcaaaatactgttttgtcggtggtgaggaggttgtcctttgcatagaagtttagtagtctccctggcctttatggactagatgctagtaaaacacacatggttgtgatcaccaaaaatgtctccatcactgcatcctggagaaaaagtccacactagttgagaaccagggtggttaagtacactccatagtacctaggttaaaagtttccatttggtaaaaacttttgagaaacactgtaatcccactaaactccaaaagactggcagaattcaaagtggagttgcaccactcacttaatttcacctaaatgcacttgcctttttttttttttttttttcctttcacccaggctggagtgcagtggtgtgattatagctcactgcagactccagctcctcaaactcctgggctcctcccgagtagctaagactataggtgtgcctcaccacgccaagctaattttttcttttgtacagatgggggtgagtgggcctctcgctactttgcccaggctggtctcaaactcttggcctcaagtgctcctcctgcctcaaggctccacttcccagagcactgggattacaggcatgagccatcaggctggcctacttgcctcaggcagctgacagccattccactcactgagcatgagctgcaggattagggtggagaccccgccccccagcagacagccccacccacagtgctggctcttgggtcatggcctccctttgtccttcagctccagggccaccctctaatccatgggtgaattcccatttcccttttgggttttaggctttcctttaacacctattccctggataaaattccctctgttgacctgccaagtgtggcaatatttgcctggctgaatttcaattgatatattgtatatttattgggataatgttacatatatataaatatacatatatatatgtatgtatgtatatatatatatgtatatttgagactgagttttactcttgttgcccaggctggagtgcaatagcgcgatctcagctcaccgcaacctccgcctcctgggttcaagcaattctgactcagcctcccgagtagctgggactacaggcatgcaccaccacgctcagctaattttgtatttttaatagagacgaggtttctccatgttggtcaggctggtctcagactcccgacctcaggggatccacctgcctcagcctcccaaagtgctgggattacaggcgtgagccactgcacctggcacatttatatattaacatagggaaaattgacatctctgtgatcctgtctttctattcgagaatatggccaatatctttccatgggatcaaatcttcatcttcgtccctccttccatagagttcagagaggttcaaagccttatttagcacttccttagcttttttttttttaagtttgttgaatttcttcccttttttttttttttttttttttttttttttgtgacggagtctcactgtcgcctaggctggagtgcagtggcgcgatctcggctcactgcgggctccgccccctggggttcacgccattctcttgcctcagcctcccgagtagctgggactacaggcgcccgccacctcgcccggctaattttttgtatttttagtagagacggggtttcactgtgttagccaggatggtctcgatctcctgacctcgtgatccgcccacctcggcctcccaaagtgctgggattacaggcatgagacaccgcgcccggctcttcctaagtattttatcctttatgtggccagtgtaaatggggctgcctgtagggtggctgtgaagactgaataggataatatgtgaagtacttaacaagtccctggcatgtagtaagtgctatggaaatgcttgctgtgatagtcaacctttgttttctgcacttcttcctctaacgggttatggtttagatgtgagccatagttgttctgtctcgatttctgcctagctcctgttcaggtgaagctgagaggcagaaatggatcaagccttaagcagatgcccaagatcaaggcactggcaggttcagtgtcttgcaaaggctcactctctgcttctaagatggtgccttgttgctgtatctcatagaggggacaaacactgggtcttcccatggtggaagggccaaaaggggcctagctatttccctggagcccttttataagggcagtaatcccattcatgaggaccaaactctcatgacttaattacctcctaaaggtcccacctcttaagactatcatgttgtgtctcaggttctaatatatgaatttgggggggacatataagttcaaaccaaagtagggtggcatgccagcaacagccccatcccataaccagctctcagtcctcttatggaggtcccttccccactcatttctgcccccagaactagagaattttcctcactggcccatcttccccagaagccagagactttttggtgctaaaacccaatcaccagaagcaaggacacaattattattgcttcatgtgtcctatctagcttaagaaaacaaagtttaatattcctagaaaacgaagcattcttgtgggcaagtctcatggtttaaaacaaaattaacgtttgctgtttactgttcacggttcagaaacaggctgacaattgctctctgtgtaacagtgagctggctgcataacaaactgccccaaaactcagtagcttaaaataacaatcatttaattttgctcttgggtctacaggtcagctgcgttgttctgctgatctgcaccaggctaggctaatctcaggagagtgagttagagactgacggatcgaggatggcttccctcctgtgtctggcagctgtcagcaggggcagtgaatttgactggaatacttctctcttatcaatcaggaggctaacctaggcttatcttcatggtgcaacggagttctgggagagatcagagaacataggagttcttgggactgatgtttggaactgatacagaatcactttcccccacattctattggccaaagcaagacataaagccagcttggagtctaggggtaggaaatagaccactcttcttgatggatggggctgcaaaggcatagtgcacagggcataaatacagggaatcatgaataattagggtcacaatcaatctaccacactccccacacaaagaagagaatgtttagcatcgatttccttcattttagcaaacgttgcttcatctcactagcagtctacatatggactgattcaggagaaagttctgcagatggtcaacctcactcacccatttattgtgaaacacatcagttgtactttgctttttttttttttttttttttgagatggggtctcgttctgtcacccgggctggagtgcagtggcacaatctcggctcactgcacctcccgaatagctgggattacagacatgtatcaccacacccagttaatttttgtatttttagtagagacagggtttcaccatgttggccaggctggtctcgaactcccgaccccaggtgattcacccacctcagcctcccaaagtgctgggattacaggcatgaaccaccgcgcccggccacacttttgctatttcttgataccgagcccaaatctgagtctgtttgagagtgtgatcctccacaccaactgtagggatatctatttccctcgctgtcctggtttctgagagcagttccttgttttggttggagttttccagcatagatttaccaagatgctgagaatagttcccagctagtggttgaataaatatttgttcacttgtcgattcaatcaatcacaggctgattaattcccagtgctgttagaagtgattgaaaatgtcacatctgattgtcaggcggcagagagcacttggaggtaatccagtcatctctcttccttctggcttctccactcttaaaccactgattctgtgtcagtttcaagcgtaaggaccatggacacctggtgaccacacagggagagactttccctgacaatctcttctgtcttctccctctagagggtaaccaagccaccctgggccaggctgtggagtggctggaggttgcacctgccccttgcctccggcactgcatggctgcactcctatccaccctcccagcccacaggtgaacactaagcagccccaggccccattgccttggggtaagaaagtgggaagcaagaaactaatggtccaatcctgggttgtttaggtagagaggaaaatactcagaagacaaggaaaaggatttttaagaacctctaagaacatggtttgaggagaagagccatgctaactgtagggacttatgcaaagtttgccatttaaactaattagcatgtggcaataactactgtgcttactactgtgtgtttaaggttttattcactgtgtgttttacttgatcatattagactttcctcctacatttggagttcccttgctcaagtaaaatgtcatatattatgtgtttaaaaggattctagtatccaattgaataaaaaagaatatatacatatgcacacacacgtaagatttttatatatcatggagtaaatgtatgctttatatttataatgtctacatatcatatttaaatttatatattgatatatagctatttaaaataaaaggtatatatcttctataaatgttttgtatagcttatgtagctaagaaaaattatatgtccatatacttgcattttcactaaaaaatgtctgatacataaagagatgtaagaatgagataataattacctctagagagttgttttttattttcctttccatacagttagacttttcattgtgagcatgtaccacctttctagcttttttaaaaagcagtttatttgtaaattttaagacagttcttccaattttcttacctcattatccccagcttaaattgtaaattcagttgacttttttagattgaattcttcctggaaaaaaaaagtttcccacaatgccctgccagaaggatatggtgtccaacccagtttaaaaagtgcacccagtctttaggttcaactgctgaagaagcccaacccctgggctggagacctcccctgccccctcgcagcccaggctgtgggtagcggcagcgtctcccctgctctccccagggccgcggcggcaaaggcagcatctacgtgtgggcctccggggacggcggcagctatgacgactgcaactgcgacggctacgcctccagcatgtggaccatctccatcaactcagccatcaacgacggcaggactgccctgtacgacgagagctgctcttccaccttggcttccaccttcagcaacgggaggaaaaggaaccccgaggccggtgtggtgagcacgtccccttctgtccttgtttccttagggccactgcacctctgtgtcagggtgggatgctgggacactggcttgctcccctcctgtcccctccctcagagcctgaactaaggctctgaagggaagaccccttttctctatgcccagtcctgctttctaacaaagcacagacctcccatctgcgagctagtagcatgatcggtgaggactcctttctggatcgttttccatagattttcttgtttattgtttctggcttacaagtaatgatgaagtctggtttaccaatcagttgccccattccatcacttacaagaataactaactcattgtaagaaccaaggcatcacactgtaaccctgtctgaaacaagaacccatctgtttatttatagcaatttaaaaaacaacattcacggatggacttttctggatccataaaccccgtaaaattgcacacacatctgttattttctcagggaaagagttgtgattttcatcatattttaaaatggagccatgatttttagaacaaaaagattaataatcacagatttattgtttgttgctcttttctgagcaaagaaaaaaaaatcttcctttcttggcaactaggtataatggtgaattttccaagcccctgggaaatacatcatctgtaaagcataataagcttttttggatcttttcctctctggagattttgctcacagatcagccttttcttacacctccaaaccaggatttagtaggtggttcagtagtcatgcatgaattatatcctgactggctgcacccatctccactgaggcttcttgagacaggaggacaggagctcaggacaaaatcattagtaccatccagtgtttcgatcccacgctcccacgtgggatcccaacttggcaagatggccatgcccctgcgtgagcgaggagaagccctttacctggaagggacgcagaccttaaaagcctgtccttcccacgagccctcctgcattcccccttggtcttggggaggatgaagaatgtgccagctcctcccaaacagaagggggctttgacccctcttatcctgtaagctgtatggacagaaagggagaagggcagagcagacagggacaggtgaggtgacacttcactctcacgcctgaaagctccactccctaccccaaagacctctcagtggtgtaaatttgtcctcgacccgtatttatgactctttctacttgggctggctaaaggccttgagtttcctgtgagtactataattttgctcaatagatgcccttaaacctccctggtaatttcttcctcaaaataataagctctcttgaggatcctacagacagaggaagaattcccgtcgtttatacatgattttaatgaacaccctggctctcacaaacattgaaaatgaggtttttcactttgtgaaagtcctttaaaaatctgtttaccagtctcccctctaaataagagttgtggaggtgatacccacatattgggttgtcttgactcaacacatctcagaatctctccgtggattttagatgtagagaaacatgttttaatagcctgcccttctagagagactttagctgagcatgttgattctttcctcttcgggaatgccttctttcccccaagaaggaaaaagaaatgctgatgaagtggcctttggcctttcaagggccagtcccaatgcaacaaaactagggtgggggtattgacatcactttccacttcataatgtttccttttaggtttcaggaaataaatctctctgtagtctctggaatagccacagatatgcttctttgaacaactcatttatcttgtggacactgtaactataactgactatatatccccttttacgtgggctactaggaagctcagataaaatctagggcaaaagagaggcatatggatgctaagtttatccttagtttcatcttaatcttcttgggaacaaagcataggttaaataaaaggagtaggctgggggcagtgactcatgcctgtaatcctttggaaggctgaggcaggtggatcacctgaggtcaggagtttgagaccagcttggtcaacatggcgaaaccctgtctctactaaaattacaaaaattagccgggcatggtggcacgtgcctgtaatcccagctaattcaggaggctgaggcaggagaatcgcttgaacctgggaggcggaggttgccatgagccaagatcatgccactgcactccagcctgggcaacagagtgaggctgtctcaataaataaatgaataaataaaaggagtagataatcccctgctccacattgtgcgggggttcaaaatagcgtgatttatccactcattactcattatcttcccttccaggcaaccacagatttgtacggcaactgcactctgaggcattctgggacatctgcagctgcccccgaggcagctggtgtgtttgcactggctctggaggctaagtatgttcatagctctgggtccagggccagctctgcagggtggactaacacgtgtctctctgcccacatgccaggtgtccatggagggaaaagttgatgtgagaggccatgaatagtcagggccaatgaactctgctgtgcatttctaagtggcccatgtgcccaccagcacacgtgcgtgtgcatacacacacacacgcacacaccataaaaccacattcctgggagcacacaacacccagcagcacgtattagcaacttactcagatacccagtgaaggcacagagatatttctttcttcatcaaatttacccctctatcctctgtgtatccctgggctcttctactccagtgatattcacaatcagctacttgaagacaaatcaaattgccaggctggtgtttcagaacatgtggcaaacaaagtggtcccactcaagatttgttaatttgtgaagtggattcactttttaacactgaaacaagataggcaaagtcacgcagtgtagaccaagatatgggctttcctgggagaccttccaagctgaaggtaagaggagaccatctcctatgtcctcaccatcctatggagaggccacatattgctactgctggacacaccttggatttgagtagcagtggaggtacctgcccacctgctactctactttcttttaatgatacctgaggctggccttatgttcacagaatgaacacatgggcttcagacaccacacacatagtgtgagtgtaagtgccggctgtgtagggaattgtcagagaatgcagttcccagcaacttgtgagaagttggattcagtctcttggggaaggagagtagagttgctaggcaaccagggctcccagcatcaatctctaggcagccctgcttgtctctctccacataggcagtgcattttctgatttgcaaaggaggcaggagttggttcctagaatagaaaggggcttcaacagattacctagttcaaccctctaccttcacaagaaaaggcataattatcctccctttacagataagaccccaaattgagagtgacttctctttttggacaagtctaaactttgactcttctaacaaaattcagatagaaaatttatgatgccaagacactggtcaaagctcaactattaggcacagagacctctgccctatcaagcacagaaaacaaaatttactcatatccaatgtacatttcctgaagataaaactgttcatctcagggtctgagtgggccctggagcctgagctggccttgctcactgcatccgcaaggagacaattagcacagcctgctgcctgtagctgagctgtgcagagccagggaacaggagtgctccaaaagcgagaagggtttccggttgccctttcaacctcagaagtcaggacttgactcacagtcttctggatttttgacaaacaaaatcctatgcctatgcctagatccataggcacacaaatggaagacctaaataaatcaaagtgggggagtgaggctgctggactcctagagattcatggctctgccttgattagtcaccattcttttagcacatacgtccagatatcctacagaaaagaatgcagtcaccattcaggcatgctttgttttgaagcaatgatcatgaacttaatattctctgctggcataaagaggaaaaaaatataacacctggcagcttgtgggtaagtccatcacgggagccggtcctaaaattcttcaaaataccaactttctgaggttggaagcagaccctgagatgagattttggtgcaagtgatttattaaggaagggatcccaggaaaggcagtaagggagtaggggaaacaagttagggatggggaagaatccaagcaaaggttcaacttcaaaagttctggcctcagtctaatcccgagtgtaaattaggcctcagagtttgttctacctccaggcaaggaagcaggactgtcatattcttatatgagtcagtcatcggctaagagctactctggagaagtaaactccaaggcatctctagctttaggcaaagcggctccaatagccaaaagtgaaaaccattggtcaggatgagatactccaaatgagagcccagagggatgaggaatagggcctccacagagcagtcccaaagctcatctctctcttatcttgagataaggttacaggaagtcctcatgcataacaacaaattatctaaatgtatgtccatcaggaccttgaaagagagagaacaacacttcccccatcatgactgtaggggagaaaaagaaaaccatctctctctcctaaccagttgtcactttgtagtttaatatcataatgtacttttctgcctaatgcttgaaaatgcctacttgagtcacaggaaatattgctcccatctcccagtatcaccaatatcagagaaatttcaaagaattttagtgggggatgactgccaccttcgaatatttaggtttctctcatatgacctggtgctttctctgtggtcctagagggtgagctaggctcgaggggtagatgtcataagaagatcagtttttgactcaagaaaatcatctggagtaaagtggtccacatgctggactggaacaacatttccaaaactgaccttccaggggatggatttttaatgtaaactctttagcgagtatagtatatagaaagaaattcattaggtgtggctccatgacattttaactaaatgaacagacccatgtagccagcacccaaatcaagaaacagacgatttatgtgccctgttgctcagcagtgcaagagattcctccatgttcctgtatgtagttataggtcgttcattctcattgttgaatatcattccattgtataaatggatatttggattgtttccatttggggctactatgagtgatattgttaggaacattcttgtacatgccttttggtgaacatacagatacatttctgttgagcgtctactagggagtcaaaatgttgggtcattaatatacatatgtgcaattctagtagatatcgtcaaatagtttcctgaagtgggtgtacccattgaccctaccttgagcagtatatgagaattacagttgccccacatccttgccaaaatgtggtattattagtcttctatattttagcattcttatggatgtgcagtggagtcatattatagttttaatttgcacttccctcatagctagtgaaattgagcacactgggtaaagttttttaaaaaatacattcccaagcctcacccaagcctcatagaatacaaatccctagggatgggtggcccaggaacctgacttttcaatgcctgttccccgggaatacttaagctgccagcctgtcgctgatctgtgaactagggtgtgaggatgatcaataaggcaatagctctgtgaatctatgactctgggtgcagagtgtgggtagctggcttctgcctctgattaggtgttggtattcagtcaagatttaatgtttctgcatgaaacaacgaatccaaataataacagagacaagggtttatttctctgtcatgtgaaagaaaatacagagataaggaacccagggctggtttagggtaccggggtaccattgtgaatcagggaatccagctctttctagctttctgctcctttgctctgccactttcatgttctctagacgtgctggaactccagccaccatgtttacatttcaggcaggaaaaggagaagcacaaagggcaaaaaaataaataaataaacaaataaaagagagagagagaaggagagagagaaagaaagagaaaaataaaaaaagaaagaaagaaaagaaagaaggaaaccagctgagtcagccatgttgaaggggttttccaaggagccccacccagtggcttctgcttatttctcattggctagaactgtcacatgaccaccgccacacttcaagggaggctgggaaatgtaattttatagctgaatgcattgctgttctgaataaaactgaagttttcttaataaggaaggagaaaagatagatatggagggaaatacaactgctaatgtcttctggcatctaagtggacaatcactcatctctggatctctattgtcttatcaacaaaaggtagcaagttagatcatcaataaggttccaatgacttcctggaatattttagctctgcttctgaaatattgtttttttagggaagttaatattttaattggatgtctggtgatttttaaggttgaatatgccttaaagctgaaaaacgttcatttacatacttttaaatattgaggtcaatacttaggaaatagtaatctaatttactttaacttctgatatatgtgatatatgttatcattaataataataaagtctttttattcagtgtccagcactgtgctaggtactttacatacataatttacatttacatcctgcaacaaacctataaggccttatgcccattttaaagatgtaaaggctagagctcgaattgttaaagtaacttatccgagttcacacagttggctttaagcattaggatgcctgttccactgggctctcggtggaacatagaaaaggccctgccactgtcttgcctgtggggctcaccactcatcctgccatggcaatgggttgcagtgaatgagttagctcttcctcaaacatgatgcacaaaatcaggtttcactttctttgagatgagattttccacaccacaactacaccagggagtcatgaaaactgaatttcctctcacgtccttataggacgtgagcaaacaaaggctatggagaaaataccagcttgactcacaaatgcattatttttctcagactggaaataatccaacctttgaaattattttttaatcctatcaaaatttagaggatagactcagaattttaaaaatgaaagaaaatgaatggatcttttacgactccaaacatctcttatgatgaagagaacgagacccagagaagtgaaacaacttgctccaggtcacacagtttacattgtcagataaagatcagatccaacaagtaaagggattaaaattctcctgttgacttctagaatttaccagatgttaggagaagtgattcctccaaccttaagactacagcatcatctttaaaacatttccattttcaatttctctaaagatgcatgtgctgactttaaattacttttgctgccttgatcattaggaggaaaatgttaattgggttcaggggaacttgatgctgtaaatagaagtactatgctctgaaagagaatggtgagggaacagccttgcacacgagaaaaacaatccattctgttagaagtcaggttcctacaaaggataaatgcttgaggtgatggataccccatttaccctgatgtgattatcatgcattgcatacctgtatccaaatatctcatgtaccccataaatacatacacctactgtgtacccacaaaaattaaaaattaaacattaaacaaaaagtcagtctgctggtcagccacttcctaagagatgcttgctgacccctggacccaagtttctcagatttcctgatgatcagaatcctggagtgcttgttaaaaacacagataccctaagcccactggagatccatagaatcagaatccccaggggagcccctggaaagctctatttttcaccagcgcccccacccccaccagtgccgtccaggaagttaggaagctctcccctgaacgaggtttgctgcatactgaaaatactaaatgtttggaggaatccatggaatcaaaacctctgaacctggacatcatttttttaaccatccccaggtgattccaatgtgcagacaaggttgagaaccactgtcccagactaccaatgttctcaaacatcactgtacagaagaatcatttggattaaatgcaaattctcaggcccacaatctccaagatgctgattcaggacaggtggaaattcacatatgtcactaatggtcctgacacagggggattgaggatcacagtgagaactcctgactaggataacacagaggctccactgatgcctccctcagcatcctgagctcccccatcatgacagccctcacattttcaatactgagttgtccctctgtccccctaggctatcagctggtggggacagggacatccgtctgacatgcccagagttagcacgatgcctgaatgtggtagacactcaacagacatccatacaatcacttcattgcgcagtaccttctcatatatctgcatcttattttcccgactcatataaaacatttgagaacagggaagaacatgtcacatttcttgtcctacagtctccaaaacagtgacctgtatatcgcagatactccataaatttattttttaattatttaataactatcacctgtaattcttgggctgctatggtacaattaaagcaggttgatgaaataaatacctactttacagaatattgtagtctgtcaattcctaaatcattcagaagggatactagaaggaacctggttttactcttcagacatatgcaaatagcaggtcaaacagtgtcatagactcagttacactggagagtgaactatgctgtggtttatctcaaaagtgaaaagttccttgttctgaaacattatttctctctctctcatgctctctctctttctaaaatgcaccccatgagaataaatctgcagagaaacatttaagggagcccttctccaggcatcagaagtacagcccattttcatggcaaagatgagaaatgagaaacctgctagccagccctctggtcatttagatcctcatttgtcaacacttctgagattaataaactcagaatccccttccagcaaaacactcagtttttagccataatcaacttaaggaacttttacaccattttacatcatttacaccattttacaccacttacatcattttacaccatatgtccaagacatgttctgaatctcctcaaataagcattgaccttccttggaacttgcttcttttctttttttctttttttttttaattatacttttaagttctagggtacatgtgcacaatgtgcaggtttgttacgtatgtatacatgtgccatgttggtttgctgcacccattaactcatcctttacatgaggtatttctcctaatgctatccctccccatccccccaccccccacacacacacatgacaggccccggtgtgatgttccccttcctgtgtccaagtgtggaacttgcttcttaatagaagaaggtctgcattcaagagcacatggatcatttgaactcttggttctgattcagatcttccaaccaatgaactttgcatatgttgaaattttatcaaatgagttatgttgctcctggtcctttgaattgtttgacttctgaagagaactgtagtgcaaggttttgccaactttttgaccagaatcctcggtgagtaataaattttgcactgcagctcagcacacacacacacagctaccctccaagtatttcatgaaaaaatagcttcctgtattatgtgcagtgcatactgcttttctattctgttccattcattttttaaaataataacaccaaccattaaatcactggttctcaacattggctgtctgttggaatggtctgagaagttttaacagtttccaatgcctgggtctcactcccagagattctgatttacttggtctgggatgaggccctaggcatgagatcttcaatgcccctaggagaaaattttcatgggcagtcccaacaacctgtgcgataacctggcccaaaaacaaatcatgatttgcaatttgaaaaacatagacaatgtgtagtaatagacactaatttccaaaaacaataacatttacaagaagactagtttattcactgaacaatgtgccaaggaccatcctggacactaaggatataaatatgctaaatataatttctctacccttgaagaactggtaccctccttttcaaaaatggaacacacccacatgccagttcccagatgaagggacagcaagaccagcactcagaagctccctgtatccccttccagtcactgccccacgagactgaccactaacatgacctccaacagcatagattagtcattcttgtttttatattttaaacagatggaatcatactttatggtctcttttctgcctggcttctttaggccaacatggtatttgtgagatttttccatgttgttcagagtacctggagttcattcattctcactgctgtatagtaccccacattctataagttacacctcaattagtttactccctatcttttggatggcatgtaggggtttcacagtttggggctaggagcattctagtacacaggtctggtgaatatgtacacatttggtcaggtatatgcctaggaaaagaatttccaggccatagcttaagcttaactttagaagatacagccaaacagttttccagtttagttggaattacttgcacgctcatccacaaagtacatgtgttccagttgctccacatcttcaacacttaacattgtcagtctttttcattttagccattccggtgtgtgtgttagaatagacttttgaaatcaatttatgtaagtaagaaaagcaagaagatttctttaattgacttatatagtggttttgaatggtgcatggacaccctcccttgaatttgagagttcacagagattccaaaatcttacaagaggtctgtgtcctgagtaatatttctcttaatcattgtgcctctctccctctctcaccctgccttttgcccttgccctcttgctctctgcttcctgtatccagcctgggtctgacctggcgggacatgcagcatctgactgtgctcacctccaaacggaaccagcttcacgacgaggtccatcagtggcggcgcaatggggtcggcctggaatttaatcacctctttggctacggggtccttgatgcaggtgccatggtgaaaatggctaaagactggaaaaccgtgcctgagagattccactgtgtgggaggctccgtgcaggaccctgagtaagtgggggtagtggtccctctgctgcatgtggaaagtgcccctgagatggctccatggcattggcataatatcacattccctcttcatgtttgggtcaactgtattttttgtttgtttgtttgtttttttgagacagggcctcactttgtcacccaggctggagtgcagtggcgtgatcacagctcactgcagccttgaacttctggtctcaataatcctcctgcctcagacttccaagtagctagggccacaggcatgcgccaccacaccctgctaattttttttattttttgtagagacaaagcctcactatgttgtccaagctggtctcaaactcctgggttcaagtgatccttctgccctggcctcccaaagtactgggattacaggtgtgagccacaatcctcggcctggatttgactcagggacaaccagtttccaagcagagctgcaggtttgcataaatccaggaggcaccatttacatagaacacagaacccctgcttttggttgtgagccttaactgtttcagtgatgtatgccattatttctaagggcacaaatcaaccactataaacatcacccagctcaataaggagaacatgactaacacccccaaaggccccctgccgtgaccactgccattaacatccccatgccagcgtagccatattcttacttctaactccatagcttaacttgcctgttccatacttactagaatcatacactatgtcctgttttacaactagattatttcgcttggagttatgtttgtgagatccagtcatgtttaatgtgtacttacagcttttctcattgctgaagagtgttccagtgtatgactataacacaattcgtttattcattctacctgtgggacaatctaaggacttgattttccgctgagtgaggtggattttgccacttggagggatttgtgtatggggttccctacacagaaaccacagcgttagtcaactgcacccacttcccttccaactgccccaccttggcaagtggattggtcagtaaggatacttcttaatttctctctgtcctccttgatgcattagtaaaatggagatagtaatttttattattatcactgaggtattatttacatgtcatcaaatacacagaacttaagtgtatcatttgagtgttgataaatgtatacaccctggtaactaccactgaatcaagagatgaggcattccatcaacccaggaagattcgtcatacctgcttccagctcgtccacacgctccacaggcaccctttgtttttgcttctctctctgtagattcgtttcaccagttttcagactggactgtgtccagtttctttttctcagcatgaggcttgtgagattcgtccaggtcaccatgtgtagtcgtagctcattcattctcattctaccttgagaatacacctccgtggcttacatcatttaaatggtggtaaaattcattccctgccagggtcatatttccgaggaccatcgagcctggccagagtccaacccctctcagactttatcctcctcgccactcttcattggtcctagacttgctgcatctcttctactcagttacccagacctgaattccaatcttgacttcaccaacttagacaatacttttgacatttctgaccctctgctttagcaattctcaacctttgtgccctgtctccctttgacagcatggtgacgtctatgggccccatcagtctaatgttctccaaattcattagataaaatgcactggattgcaaaggaaaccaattatgttgaaaccaattagaaaataaattcatgctgaaatatatgtccccttgtcagcacattaagtaaaaagctctagtggcaagtctaatggccacaataatttcagagcagcagtgatgactaattgctgctgcaggatccatgcagtggctgtggtgggacacgaaaatctgccagctctttgatgacaaagtccgaggaggagctaatgccactctgctttgtggcctgcattcataatcgaaagagaagaaaagtttctgttataatctagtgaaaattaaaatgtggaattttttccattgaaattattagaccccctgaattctatccaaatgggccccaaaataagagatttttttctctttcctcaccagtaaaacggagctaatgtttttcctccgcaggctgctgggagactttagcaacacacaagtctacagcaggcacacagtaggcacttaataaatgtaacattgcctctccttctcattcatgactagatgtgaacacttctagcttacacctgtagaatcaaaagacagtaatctcctagagtttttggtgaaataattgtctgatttttatgcaaattccaaatcagatatcctctcagcctaaaatatcctccaatggacaagcatgtgccctgggattcccatcctcccatgggccagcagcctgccatagatgggctgcctaccataggtaagcatcctcccacgggccagtgtcctcccgtagatgggcagcccaccataggtcagcatcctcccacaggccagcatcctgccatatacgggcagcccaccataggtcagcatcctcccatgggccagcatcctgccgtagacgagcagccaaccataggtcagcatcctcccacaggccagcgtcctgccgtagacgggcagcccaccataggccagcatcattccacaggccagcatcctgccgtagacaggcagcctaccataggtcagcatcctccacgggccagcgtcctgttgtagacaggcagcctaccataggccagcatcctccacgggccagcgtcctgttgtagacaggcagcctaccataggtcagcatcctcccacgggccagcgtcctgctgtagacaggcagcctaccataggtcagcatcctcccacgggccagcgtcctgctgtaggcgggcagcctaccataggtcagcatcctcccacaggccagcgtcctgctgtagacgggcagcctaccataggtcagctcctccacgggccagtgtcctcccgtagaagggtagcccactataggtgagcatcctcccatgggccagtgtcctcctgtagacgggcagcccaccataggtcagcaccctccatgggccagtgtcctgctgtagacaggcagcccaccataggtcagcatcctcccacagaccagcatcctgctatagacgggcagcccaccataggtcagcatcctcccaagggccagcatcctcccatggacaagcatcttcccatgagtgagcatcctcattgtttactcactgaacccctagaaagtggcaccaagtggattactgccaagctgagtattttttttccatgaaacagtccatgatttaagaaggcctcactctaatcagcaccacatggaaaaaataaagcttcagcccaagccctataataatctaaaaacacagagctgcccaagtcccaagtgatgttacaaatgtcctataataaaaatagctactctgcacagttcctcaccattttccaaagcttctgtgtccacacatcatttctgttcactcccgtatccctcctcttggcaggacagacttctctgagctctaaacaagttgattgacacagtcaagcccacagaggctgtaaatgtgagactggaagtcacttttattgagtgccaactgcatgctatgtgctttcatacacgtaagcttcacagccaccctattgttgagggtgtgccttatactcgcacagtcgaggtgggagcaggggtgaatattttgcagccttaacaacaaactggtcccatgctgggtgtcagggagaaacaccaactaggtgtggtatatgctaggcccatttacattactgtatttaatccttgtaagcccaggaggtgtgtcctatcattattactttttatacacaaggaagctgagatccagaaaggataaaaaaaaaaaaatgtgctcagagtcacaaagggcagagcaggacttgaagcaaagcccatctaaacccaaaccccaggctcttttcactacatgaccttgaccttaatcagctcccgtgcatacaggtcctacattaggccgtatgtgagagcagccctactgtgagctcacagtgccattactgatgacaggaggttgggaaaggtcaagggcatgctaaatgtcatccagctactaagcagccaaactgggatctgagcccagtcactttgacccctcacggtgggctctcaggtatctcagtgactccccctggagaaggtgaggcttgggtaggggagggagtttcagtaaacattcccctggggattctgaaacacccacctagtgggtgctcccatctcccaaaccccatcactggcattccagaggcccttttcactggtctacaatgccaaggtctgccgtgtcttttgggaatgaacaaagagacaagactgggaaccactgtccaaatgggggatttaaggctaaaccctactcatcataactaactttacccaaagtcaacatgaaatgggcgttgacaactgtttcccttgttagagttcagaataatttcttgagaaatttggaagtgcagtgactttctgcagtggtgaaaatgttctgcactgtccaatacaatagcttgtggctattgagtgctagaaagtggatgaccgtgattaagaaacaagagttttcattttatttcattctcattaatttaaatttaaatagcaacatgtggctggtggctaccatcttggacagccatgtctaaggcacatctggtagttacatcttagcaggagggatgctgaattgtgcaaaccgaatgggaagtggagatttaataacataaactctatgaaggggtgtcaagaagatgagactgcaagaaaggcttgctggtccattttatagcctcatgccttcccccagcacgacatccaattgcagcatcctagaagcctaaaggcagccttgggagggtgctagtaagaactgctgctaagaacttctctcggaaagtcactgggatagcactttattccactatctcatttaatcacaggaggttggcatccctagtcttaatttaggtgagaaaacaggatcagacaaataaagcaaacggccttaactccaatgtccttatccattccacaaggccctggggcctggtacctcattcccttattgcaaaaggagaaagacttacgatgtctgtgcctttacagacactctgcaagcagggagtgggggctggaatgtccctcacaggcagtgcaactggcacgatatctacacttacttgcatataagcaatatttacaattaacaaaaaggcagcaccgttgcagtatttaggggaagagttagcttggaatgtactgcggccctcttagtcaagctacgtgtcaataccaggctatattttctgagattgcactggacaagccagacggacttctaatgatcgtcaagcaccatatgattatgagagagggcaggaggggagcaccgcgggagagaaggagagagagggaatgagggcgtatgctgagatgaacggcagtttatctcccagtttctgaatatgcttagcattccatcataatctgcatacatgtggaatttaaggccagagagaacactggaaataatgttatccaagtccctgtaaggaatctgaggtccggagatgtgatcatcccaacatctcacaactatccaggaactttatgcaagatcaatgcagtgttttcaatgaagagaaatgggaaagcactatatttcagcactaactcagttggggcctcccaatggactgggccctcgtctgtcatattcatggtgtaaccctagtgcctacaatagtgctgggcatatagtagacaggtgataaatattttttaaatgaatgagggaatgaaaatattcagccagcagcagccggacacaagggaaatgtctgactgctggcaataggaccggcgggccagcaaggcaaatgtgggaaggaggctctgccttggttggaagggctctgcctcctctcagtgccctccggtccctcgtccacccccacaccagaacttgttctcagatgcagatgagttaggtctagggcaaatacacttgttgaagaatgcagaggctccacagggagatttggagagcagccccagggctggctgtgccgcttgacagaggaggcccttgtgaccacgaagcacactcgaggagcggtggggtacaggaatcaacagccgtggcaatcgccactctccataatgtgcagggctgcacagaaacagcttccaaggtggagtgagtggtgattgtcaggtttgtgggtttccttggcattaatcttcccggagatggagtcaatttgaaaagcaattttctaaagaggctttatcaagagagtcagtgaaggatgctcagctacaatcaaaggggaaaatacacctggctgtgaccagctgcaccagctgtgtgtagaatgagcagagccagcccaggccggccccatcagccagctgggagtgacctgtctaacacagctgcccccagcccctctgggcaccctgaggggactgttcactgagctcctttaaggctgtgccaaaatatgtgatccagctctgaagtttaagtgaatttggaaataaatgttaaaacctggtatcaatgccggaagcagcatgggagtgagaggtcagcgtgtgctcggccctgtgccacctgggggactgtggaccagcactcccgagctgcagaggcttcctgcacaagttcatgcccacctgactctgctacagggggaggagaaaacctcaccatggccacctgctgcgtgtcgtcatgtgactgccacaaaagcaggcatcttgggcacttgagaaagagtggctgtcattgttactattgtgattattctatcaaaacaatcacagccttataactttttctttttttttgagacagagtcttgctctgtggcccaggctggagtgcagtggcacgatcttggctcactacaacctccactgcccaggttcaagcaattctcctgcctcagcctcctgagtagctgggactacaggcatccaccaccaaacccggctaatttttgtatttttagtagagctggggtttcaccatgttggccaggctggtgtcgagctcctgacctcaggtgatccgcctgccttggcctcccaaagtgttgggattacaggcatgagccaccacagcttcataactttatcttacagttgaagattcataacacaagaagcattccccagggcctcctgggaagcaacacctatttcttgacacaaggcagtttaaacacttacttgcaatgatacacaataaaataaagatacaagccaccccgacaaccccaagtttgtcttttataagactggaacactacgattttgcatgttatctctaataggtcaaagaagaactcttttttttttttttttttttttttgagatcgagtctcactgtgtcacccaggctggagtgcagtagcgtgatctcagctcactgcaacctccgcctcccgcgttcaagcgattctcctgcctcagcctcctgagtagctgcgattacaggtacacaccaccatgcctgactaatttttgtgtttttagtagagacggggtttctccatgttggtcaggctggtcttgaactcctgacctcgtgttccgacccctcggcctcgcaaagtgctgggattacaggcgtgagcctccgcgcctgacctaagaactcttaaacctccagaaagcatgcttcattttctgcagcaaatgagctccagatcatggcctggaaactaacaccctgtgactatttaaaatgtttctgcagagcctctttttgttccaccaccaacctcctcctatttaaccttcttataaattgataattcctgagcatatatctcctttttgctttaaaataagaatgtttcattccttttcttctcataaaagcaatacatggtcactgtaagaaaatcagaaaatgcaagtgagcaaatgaagagagaaacaagaaacatctggaaaatactgttcctaggctctcccaatgccacgatgccagccaaaaaaacctgacctgtgaggggagaatggtgttctttctctaccaagttcgctgcctctggaattcacagcatgcttttaatttaatttcatagtaacttaatattctcagaagagtccagccacatgtctcctctctcagcagacccagctcctgtgcaggaagcagttcacatggcagggcaggatcggggcgtttttctagctggcagtctctccgtggtgctaaaaaagccagactcctcagccaacgtgaaaagagttgttctagtgctgggatgatctcttatgatggaaggagagaaatacagattggaccaaacctgagatgaccttcaggcacaccatggctaagggggtttcagtagatggtgacagtgcctcttgttcaggtccccttcactgggctatgcaccaccccagctactgtgggcattggctgctaactgtggtcttctgcctgtgtctctgaagaatcaccctcaggggctatggaaacctggctgaaataagaatacataaaacccatgctcctgcctccaagcaggacaactgtgtggtggcgttgatgctccaaagccagcatggcctgtgacccccaggcacaccccagtgtccaaggcttctaggaaaatgtgtgattcttaacacaagtttgtgtgtttgtccctactcccacctgtctttcggctttccaaggtgcatggaatatgtctttcagtctccctccatctctcccttgcaccctctatcacaaatgcacaccactcactctcaaataagacctttagcctgggcaatcggtggcctgtgttctagtttccccttctcagcctcgctgtcattttccctcccttagtcttagtcgctaaggccttccccatgagcgtggggctcctgggagaaacagatacgacagccaccatagaagattcacacagacaggaacacaccggcccttgttgttctgccagtgaggctccttcttgggactcaaattccaggctcctctgccatgcccttaatgtcaaagtggtcgccggcctacatctatctttacaataacttcttaagggctttttaaagaaagcaaaagaagtgaggtgactgagcccacagatggaatgaggcccatattctgtatcaccaacgatgacataaatatagtcaatagtcctcagacactgtgcagagggatgtggtaatcagtttccaattgctcttctccagagacagataacacctgttttaggttgggttgctcggaagcagagcctgagattgggtttgagtacatgtgctttattgagggagggcttttcagggagaactgtaggagagtgagggatttgggaggggcagaagtagccaagaaaggatgtggaaccaggtatgtgcatgtggcctgacccaccgggggctttggagcatcaacgccaccacacagttgtcccgcttgggggcaggagcattggttttatgtattcttatttcagccaggtttccatagctcctgagggtgattcttcagagacacaagcagaagaccacagttagcagccaatgtccacagtagctggggtggtgcacagcccagggaaggggatctgaatgaggcactatcactatctaccaaaacacccttagctgtggtatgcctgaaggtcatctcaggtttagtctaatccatatttctctccttccatcataagaagtcatctcagcactagaacaactcttttcacgtagcgaaggaccttatagttaattcacagaaacttcatgtatggtgggctgtggtcttatttctagcaaaagtggctgtctcatctctgattcttagccaattgaagaaatattttcagttttccacaaggcaagcaatgccatttttctgccagagtttctacaaattgacttgtaaagggtctgtcactatgactccagtccacaagggtcctgggtgcaaattgggacagaaaacaaattttcttagaattcagctggtgttctgaattcttaagataatagtgaccactgcacttgacaaatgattagtgatgttttataatatctataatgattgccactcagttacagtctttggttgttggcttgtgaatttccttcttgaaacttttcaagaagccctagactacaggaaagaaaagagagctcaaattcaacacagaactcagagccagggtctctcttcctgttatcattctctgcttcctgcaactgtgcttctcaaagactcccaaagcccctctggctcaactctagaaggaaagcccgattctgggcctggctgcttgtctgcctagaaaccctgtgatagaatgtgtcatttccctcataccttgaggttctggatgaatatttcagagtcctccagagaggtggccagaaaacctgcaaaacaaagctgcagtttccccaactgcttttcctagagcctgtgagccgggaaaaaactgaatgcccttgaaacagaaggccaagagactctctgcctgttgttgttgttcttatcagattcaaattcaacatacataaacaatttagacccgcactgtccagtacagacgcaaccagccacaagtggttatataataacatattagattagttaaaattgaataaaataaattgaacattcatttcagcactcacatgatctatgtttcaattgctcattagccacatgtagccagtggctaccatactagagattatatatatagaatatttccatcatcgtagagtgtcctattggccaatgctggtctagacatttgtaaatatactatgtatatgagtatacatgtatatacacatatagacacgttatatatatgtgcatatataatgtatatgtaggataatttatcttgccagcaactgttcagggcaggaattaatagctcagatcatgcaaatacttgcccacaactggactcgtactctgagactctttgtgctaccctacacagctgtccactgctgggctagagcccaatctttagttattcatcaccttacctgttttgtttctgatcttgttctgaataaatagcaccatctttgagaaatccaggttatggccctcattaccccgacccgcaaagttggcttaatgcctgctttccaccaaatggatggtttccccagatcctgggaacagaaagaccaaccccaccatcactggatccccatagctgatggacactccatacatgattcagcatcagtatccgggggtgggagaggggaatacagcagtactccatgaaaccgtttaagtctatatttgtaaagttcctccagagagtattaatgaactgcactgtatgtttcagcaagccctcccaggttcatggccttggttcctagggcaatgcagaaccaaggcttgactccaactgggcacatgaccactgtctttttgtaaatgtgctttacaagatgtgtgtttaaaaatattttacttatactccaaaataaaagccatattgaggaaggatatttgcataggcaatgggccagtacatgtgccaagcattgtgcctggtattttattttattttattttatttatttatttatttatttttcagcacaggaagataatatttattatattttaactagaaacagaacagatagcaagttcacgaggtatgaatatttttttcttaaatcaggcttaaacaacaataataaaaaacaagtctgcatatatatgttggtcactattataatcttcaagggcacaaaagccagcagcataaagaaacatgaataatgactgagaagttttgatgtgccaaaaacaaagatcactgcgttgaactcctttattttgttaatattattattaaacatttaacaggtattaattattgttatttggcaaaatatccaacatgcacatggtattcctacaagaatcttgccttaatattgttaatattaacactaagtttattcctctccaaaattcaatgagttatgattccactctctgtaagtgttagtgttagtggtaatatgcaaaactgattttgtgtgcagggttaagtagcagattgacttcgcatttggtggccagctgtgtaccctaatttttatctattttcttaataaatttaattacatttcataagccctgagataacctgctaatgattgtatacttttaatctatactttattccactcaatttgaaccccacataataagtcttcaaaattatttacagatggttgtaattaaagcaatgacaaaatttactacttgtatagataagactgataataaggcctttaactaagagttgcatattttacatgcacttttaacttgctaggagcaactcttaaaattacatctatcattctgtcagaaagcagttaagtgcttttcattttgcttacttctatatgtgtaaccagactcacttttttcctcccgtgtaaaacaactgttttttttccttccccaaatattaatacttgtcttccaactgaacaattgctaaaaggaacttagcatttacacagcacattgataactatagtgctcagcagagacatatgcccataataggcatctgataaatgtttgttccacatggaatgaattgtaaggcagctgtttgagtcatatactgttcatcatatactgcaactaattttgtttaactaggaaattcagtttaccagatttaattcaccctcaagtataaatccaaaaactttaaattaaaaaaaatcgatttactaatcctcagaaaaagtaaacaagttaatcatagttgttactatgctattagttgatagaaaatttttaaaaattactttccactaaatattgtgtacaactaagtgaggggaagaaagttttaaaaaatgaaaagatattagctaattctcatcattttctccacatttatccttgcagcttatttgttcatatatttattcctgttaacttctctagctgaaagagaattttattatctgaatggagttccccatcaccttacgtacaaaatattagtgaaaagctagtgtaaatgtaagattgtattttcatgtcatgccatatttctgcatttattttttgctagcattaaatttttcgtatttaaatgatgctgtatagaatatgagataatctgccaattgctatgatattgcttgcttacaatattcagtttttgttgatagctttaaagtatattgcacacttgtcatctagcacactaataaataactatttttgaaaggatacactgacaaattcttaagttaatggctttaacccaacatttttagtcagttaaagaacagcaatggcaaaaacattgacaatacagttcatggtccagttctcccatcttacggtacaggttccatcagatgtggtatcccaaaaacaggagctgctgtgcgaaagccatatgcgctcttctggaccactgcacatttcacaatacatttataagcttttcccagcttaggcagatgtgttaacgataattccactatgcttgcggtccactggttgatgttgttgtaattataatcttcaccacctaaaaccccgtctgcacattctttgacaatattgtgggcttcctcagcattgaggccaacctcgtcgcagtggcgatggtactcctccatggtagcgcctgttctccctgggggcggagctacgcctgtgcctggtatttcatacatggtcttatttaaccacacaagaatcatacggccgggcgcggtggctcacgcctgtaatctcagcactttgggaggccgaggcaggcggatcacaaggtcaggagatcgagaccatcatggctaacacggtgaaactccgtctttactaaaaatataaataattacccgggcacagtggagggcgcctgtagtcccagctactcgagaggctgaggcaggaatggcgtgaacccgggaggcggagcttgcagtgagccgagatggcgccactgcactccagcctgggcgacagagcaagactccgtctcaaaaaaaaaaaaaaaaaaaaaaaaagaactatccacaatgacagtgaaacttcgagtgcttaaataacctgcccaagctctcatgagcagtaaacatagaagcagaattctaatccaaatgggtttattctcaaagtctggagtcttgatgttacaccacgcaatcctcaaatgcggtttccttttttccttctttctactgcaagaacctttgagcttctcccactccaagaaggccatctccagaaaggagattgcctgtaaggacagcctagagagtacttgggcttaacctcgctccaactctcgccaaagactcccccaaagtctcctgatcattcattggactgcctttcactggaattaatttacccattttcagcttttctttttttttttttttttttttttgaggcagagtctcgctctgtcacccaggctggagtgcagtggcgcgatctcggctcactgcaagctccgcctcccgggttcaagccattttcccgcctcagcctcccaagtagctgggactacaggcgcccaccaccaagcccggctaatttttcgtatttttagtagagacagggtttcgccatgttagccatgatggtctcgatctcctgacctcatgatccgcccgcctcggcctcccaaagtgctgggattacaggcgtgagccactgcgcccggcccagcttttcttaatggtagtaatggcagtcatattagcaacagcttctatttatcaaagcacttagcactttgaaagaaagacattatgagttcctgcctcagtctgggttgtcccagaagtccaacctgagacaagacttgggtgctgacagttttttgagaaatgatcccaggtaacacaagtgaggaattggagatgtaaaataaggaaggggagaaaagccaatgaagagtgcattaatgagcgagttgccaccgtgggcagctgagctcagtcccactagggacactgagttgtcacgctgaggaatagagaaaccggggtaaaaacctgtcagtcactgggagagagctacccctcaaaggttaaatccctgccacctttgggccgccctgcacgcaggctgtgcaggcttccacggaggtgggaggaagcccagggggaacacggggagattctcgtgcctggggtgggaagcagtggacgtgcaagggagcttcagctgcaggtgaactcagaagggacttaggagactcaggagggacatcacagcatctactacattctccttccacacagaaggttccaagcgtaagtaacttgctcacagccgggcgtggtggctcacacctgtaatcccagcactttgggaggccaaggcagctggatcacttgaggccaggagttcaagaccagcctggccaacatggtgaaactccgtctctactaaaaatacaaaaaattagccaggcgtggtggcacatgcctgtaaccctggctactggggaggctgaggcatgagaatcacttgaacccaggagctgaaggttgcagtgagctgagatcacaccactgcactccagcccgggcaacagagtgggaccctgtctcaaaagacaaaaaaaaaaaaaaaaaaaaaaaaaagagataagtaacttactcaggctcacacagccagtgtgggaactaaacccaggtctgattgatcaaccccaaagcccttgccctttccgccacctgaagctgccctcaaaatcccttgtaaggtgcacccaccactgcttatcctatctcctcttcactctgccctcaggaaaataccatccactggcaagttggtgctgacactcacaaccgacgcctgtgaggggaaggaaaattttgtccgctacctggagcatgtccaggctgtcatcacggtcaacgcaaccagaagaggagacctgaacatcaacatgacttcccctatgggcaccaagtccattttgctgagccggcgtccaagggatgacgactccaaggtgggctttgacaagtggcctttcatgaccactcacacgtggggggaagacgcccgaggcacctggaccctggagctgggatttgtcggcagcgccccgcagaagggggtgctgaaggagtggaccctgatgctgcatggcactcagagtgccccgtacatcgaccaggtggtgcgggattaccagtccaagttggccatgtccaagaaagaggagctggaggaagagctggacgaagccgtggagagaagcctgaaaagcatccttaacaagaactagcgctgcacatccgcctttcccaccgccctccctccccagctccgcctctgtcctcgctccacgtttcaggcaggcacctagcaattccatcacccgtacaggcaattccgtcttcttaatctgaagcttcactcactgtcaatgattattttcattacaatggaaacaatcttttttactctatgccccaaatatagcgttcccaacaacatccatgtcctatgtgtgactctaaattctttatttctgtcattcaaatgggtgatatcctgaaaaaaaaaaaaaaaaaaaaactgggacagctttcccctcatttttttttttgtttctgagaaaagaacgtattttaaaagccacatagagtgactccaagaacaattgtccatggtctcaaacaaggggctgttacataacaagaaaatcaaagctgaggacagggtgtgagcgccacatctctgaaagcacaggagacactgtgctataaatcctttggggagcgatgttttgaatttagtgagatttaccagggatgtagattaaggtgatgtgattcaaaagatgccattcatagagagccctagttactgcatggggaaagagatccaggaagcatgagtgctggatattttactaccaatgccaagataattcactctactcagccggcgtggcaaatataaaacttacagagcgtggctgtgctctcaccagctgctgctctgagttatgttaaaatccgctagagcagcccaaatttttctcagtttgtatagagttcatcccagccccaattttctggggctcctcacatagctacccaaaagagaaaaaaaattaagacaagcctggcaacacacctggtgaagagtagtttactagcttttcaaacaagaatgtcccttttcctaagtcactttgaggtgtctcaatctgatctgagtgagaggcgacaggagtatttttttttttttacagctttacacacacagatgtgggctttgatttccaagtaatataatggaagagaaatctcatactcccccacagtttgatgtcattaatgtgttgggaaaaaggcctctgtcccggaagagtcatgggaggtgaaaggggcacgtttgaagatgcgagcgctatcttcacatagttctccagttgtatggagcctcttctgccaagagagggccatgcaattcatcccagaggaacctgaggcctgaaggaggtgagagaagacctctgtgaggaaagcacacagtcaccttctcggcaactaagcagtccctgagaccatttaacatgcaacccgaaggttatggtcaatcccaaaagtcaccactccattcccaactagacattaccaaagtgacctacccagagattgcttctcatccccagtcccaatgcacatccattcccaagaaatgctttgtcttcagcctctccaggcaccatctcccttcctgtgggagcagagagcttagcctggagcacctttccttcaagccagcaacacagagcactaggttcaattccctgaaggtggccactttaagagagaaatctgaaaaccccatttgctttcttttctcccatattggcatggatttctgtcttctctaacaccttgtgaccttctctatatcatgctttaaagtgtaataatatgattttttaaaagaaatttattacttgttgcaaaggtctttttaaaccagtttagatttcaagaaaaaataaatggaaatcatcgaaaattcatttcacattaatggtctaaaaataaaccaaaggacattatgtgtgcatgtgtgtataagtgcacacagaaatatatatacatatgtagactatatacatgtgtgtatatatgtgtatatatacatacacttgtataaatgtatatacacatatacctataatgtgtgtatgtgtatttattgaagaaacagataccatactcatttctaaaagaatattcagagaatatcaagatgattctggctgaaaaaggccagtggaaattcaggtgaaaatgttcatcaattcccattgcatcacctctgtaatttttcagctctctgtataaacattaaatgtcttatatagcagcaaaaatataaaatagttgtccatattttcacaggtgtggtgtaatttataaaattagaaagcaacttatcagctacttaagagaaatggcaagttttgatatgagtatacaatatataaaaatatatatagtgctatatatataaatatttggtctctatttcattttttgcatcagtattaatactaaaatatgtctcgctagtgatgtttttatgatatccctgatcctaactgaagagacagttatttatagtcatttattttaaaaaatgaaaataagtgaataataattaggttaacattgttgctccctgtgacaaaattttataagcaaatttcaaaagacatgttgtaaattaggaggctcaacaataaaacattatgctccagaaattatgtgagatgtgctatattgtacatgaaaatactttcatccattctaggaacagataatttaaaaattgccaaagagagatctaaagagcctgctttactaagtatgcataaaagacttataattaacatataaatcatacacaaattattatctacagcagtatttttcaaactctagttacatccattagtgggttgtaaaatcaatttaggaggtcagtttttaataaaatagagtaatttagaatacagtaggagagaagaaaatcacaggataggataggatagaatagaatagaatagaatagaatagaatagaataatcatgcataataaggataagtattgtttcctgaaatatttgtttcagatgtgtgtgtgcacacgtgtgtgtgtctgagtgtgtgtactggatcacaatgtaaaatacatttttcattgtgagtgatggtcaaaaatcttttagaaacactattctaaaatatattaatcaggctagactaagttatgctatagtaacagacaatctcaaaatctcagtggtttaatacaacaaaggtttatttatcatccacacaaattccagtgaaggttcaggtgactccccaaagccacagacctccatgcagtgactcaggatccaggctgtttcaccgtatggtttgtaatcatagcacaaggctgctacaatcaccatgcagaagagaacccaaggaggacattcatctgctcttctatgtttagcctgaaggagacacatgcatcgcttctgcccattgcccactggccagtattgggcaatagccctggctaaatgcaaagcaactgggaaatctgtgacaactaagggaatatttggtgagcattagagtctccactacagagagtgcttgacattcccttaaaacatgttcttaagaaccgatttaacatggcaatcactcttcatggatggtaccatgaacattattacaaactggctgtaccttaccccatagaccacagactattctagaaaaagaccttaataattattcataaaatattaatatactatatttaccaaagttaattataaaaacaatttataattctgtcctctgatataacacttaaactcaattattaaaatcttagccgggcatggtggcatgtgcctgtagtatcagctactcaggaggctgaggtgggaggatagcttcagctcaggaggtagaagctgcagtgagccgtgatcacaccactgcactccaacctaggtgaagagcaagacactgtcccaaaaataaataaatataaacagagtctgttactaaaaatagatattggcggatataaggtccaaggtttgatcttgtgatcctgagacactcctttttaatacttaggtttaaagatggatttccaaaagattaagtttaaaaaatgatttttaaaaattccgatagagttactactctatgtcttcattcgtatcacttataagttaatgcatggttttcatgtgatcagcgcatttgcttggagtgattatatgaaaaccacacagtgtaagaccttcaggacacataagtattttatagttaacagaaagaagtgctgaattaggggaaatggtgatctcacagctaaagtgtttagatgcaaatagtctaatttggtagaaatttctaaaaagcaaaatgcaaagataaaggacagtggttgtggaagagagttaggggatccttaaaactctggaattgtgaaatgccagagacagaatgtctcctaggctaatgtaggtggttcagttgtggccagcagggtggttctttgtctctaaagaataagtcaagagaaagggtgggaggatggagggcactcagcacatgggagcttagaataaatgagagtcagggtgaccaaagctggaagacagtgtctggcagcattcagggtagggaaacatgaagcctgacataagggagaattccagtctctgaagagctgaagtctatcgagggatacaggccaatacattggcaaagccacccccagagagagtgcattaaaacaccaccacttgccaatggtcccattgcatgctcacccacagcctcctcatgccttatgcagcttcccaagaacattaacaccggtataaacgatccaagcagctagatctgcagaaaacaacaccctctctttgaattgtaaactaatcagctagtacttgagtttttccattagtctcttgtgcatttagttgaaccctttccttggcttcaaaaaaccctgatcaaatttggtttaagatgtataagggacctggaatcaaagtctgagaacctagggtaaattctccaagccaaggtcctggctccatgtttctcttagaactgagaagagactcacgtttgtgaacctgggaatagaatgatctcaggtgagggatgcactcagcctaaaaagatgaagattctgtgtggctaaatgtttaatgctcattcatgcatgatttgcggtgggatgggatgggaaggcaactagaaatctcagctcacagagtttcaggtgccagaagagccacatgaggctggtaattccttaggcctaacgtcactgttactgatttccaaccaggaggctttgggccaacctgccctccccatcccaagatggggtgtgccagctccccatcccaagatggggtgtgccacctcacaacaccctcaaagatgtccctctgaatctgagaggatatcccatgagctactcaaactagatggagggaagaagctaaaatttatctttttcttttctggcaccatgtcccaggaccactgatgggccacaggtgacaggcaagctcctggtcacaaggatgcaagcatgagggtaaaggggcaggtacagctggtgagggcatcagcccagtggagtcattgaccaggagtgtatcttctgataaaataagtttcaactcaaaaactctgtttgaatacaacataagtcagtgtggctttttatgttgtttgcttgcttttatccatgcctgagaaaatggagtcaggtattgtaccaatcaagataccaatcatcaatgtgccaaatgccatgtgagttttggggtgacttcattcaccagcagtgtcctaaccacaaatctatgttagaaaaattttaggataaacttgatagtaatggctgcttgaagattttgtttgtttgtttttcggggttttttttcatttaggttttgtttgttcgtttgtttgtttgtttttgagacaaagtcttgttctgttgcccaggctggagtgtagtggcatgatctcaggctcactgcaacctccgcctcccaggttcaagcgactctcctgcctcgacctcccctggtattacaggcgtgtgtgaccatgcctggctaatttttaaaatatttttagtagagatggggtttcaccatgttggccaggctggtgtcgaactcctgacctcagatgatccacctgcttcagcctcccaaagtgctgggactacaggagtaagccaccatgcccggccagatctttcttataatgtaagcttcaagtcgaggagagaactaaatggaatttcccaacatgaaggtggaaggaagagacaggttccaatgccaggtttagaagtgtcttctgagatgttaactgaattttgcggcagactgttggtgcatcctctgtatcagggagtctgcaaactatagccaaacccagtacgcggtctgcttttataaatacagttttgttggagacaactgtgcttgtttgttgttgtattgtctatggctgatttcatgctaccacaagagagctgagtagttacagcagaggctgtgtggcctacaatctggccctttacagaaaaggtttgccaacctctgccctatatctccttggcccacctaaaggttatctgtaggcagtttccatgcatgccaaaggccattctatcactctgcccagctgcagaaaagccccagacctcgtgtggagcaggccacaggtgatagggcatcagtgccctagggccaccctctcctgaggagaaatgggatggagagctggtagacggatagctcagcttcctcacctcctgcttgggacaatttgaagatgttccacccgctctcttgaagggtccccagtgggatggagccccagctgctcacagtggtggccacctcattaatgccccctgcgtggacacatccattccccatctcatgcctcctctttctccagtcaggagacagaaaccataccagtggttttaacagagagaatttaatacaaagtaccatacaattagtataatgaattgttacctagttaattcaaaaagcaaaagaaaacacaagaatcacatggaccaaaaagtccaacatttgtgggagtggggggctcacgcaatgaagatgccctcctggctcgggcaggatcctaaggcatccgtggcaccccagcctgccttacccacccacagtgcccggaagtggagcacaagtgcacgtgttaggacctgaaagatggggagttaagacctggcagagtgaagccagaggaagctcaggtggaggtctgtagtggtcccaatgtgcaaatcagtcatctgacttgggtacaggtgcatgaggccaaaagattagagaaaccacccagcagctggttcatgccaagatttccctcaggaccactggcactctctcaaggaaacccatgcagattttttcttgtaaaaccaacgcttacagtctttagggagaagcccagcgggtggtatggcgctggttatggaatacaagtgcctagtgggccacttcttgtcagcagaccttcaagaagcagctagctaccacctaagaggagaggttggaattaatacaacttggaagtctcagaggtgggagtgtgctgggacccagaccaaggaggggcatcagcaggctagtgcaggtatctctgcagagactgcgatgaggctggtcctgcaaatgctgggaaaatggagaactggactcagctgctgctacaggaaggaactgccactgccagggtgaagaagctgtctcagtccatttgggctgctgtaacagaatgtcatagactgggtaccttataaacaacacaaatttatttctcactcttctggaggctgggggatccaagatcaaggtgccagcaaattcagcgtctggcaaaggcccacttcctggttcatagatggcacctcctcactccgaactcacatgctagaagggatgagggggtctctaaggtctctttcataagggcactaatctggttcatgagggctctgccctatgacctaatcacctcccaaaggccccacttcctaataccttcaccttggggtaaggccttcaacatatgaatttgcaagggacataaacattcagaccacagaaggattgctggggtggtgtggacaagagcagaaagcaaacaaaagccagcgagtgccttcttcctcctccagactttcagtcttcccccagctcccctctaacagcacctcccagggagcagctggctaagcaggacctggctgcagagtcccagccccagcatcactgggtagagaggggcaggtttgaagcaagagacaggagcttactatccttcctgcgacaccaccctaacaaaccgcctgcacccaagacctttctccgggtctgctttgggggacaacccaacttcatccaaacctccttatctgttgatacctaaccttattacttagcagttatctttggggttacaagcaaagaaaaccaactctaactagcgaaaacaagtaagcagtatgtcaaaaacatgtggtgtagccctcaggcctgaagaaccagccaacaccatcctagaaaaaagacagtgattggagcaaggctggggacccggaaacacagcaaggattggcaggcaaccttgccggggtctcaggcggcaagtgccagcacctgcagcctgcgctatactggactcagatttctaatttcattgagggtgaatctgattgggctggtccgggtcactggcccaccctgaggccagaggaaggcagaatatcttgatacattagggttgtatccagtgtgggaggagcggctactcaatacaaaatcagggctgtcacctgagggacgggaggtaggagtggcagatgttagtctgctgtctcaggttgggtcctccagaaggcaaccctgagacaaggagtgaagggcaagtcatttatgtgaaaggaagcatctatatcttgagaaggaaagtgagacacgaaaaggaggaggccaataccggaggcactgatcagtgcatttcttcacaggcatctgaggctcaaacccactggggagctccaagagactatgtagaatatgcctaaaagttaccctaacagcagagtgagagggctggggaagagacctgctcctccaggtcccgtccacccttgattgagggctgctcccgggagcatgaactccccaggacaaccaatctgcccaggtatggaccaagcatgtgcctgtggccacaggaaactctaaggcagagtcgcacacgcctgccgcgagaagctggagtgcggtgagacttgggggatctggcgagacaccctgggtggctgatacaacagcagtgacgggtcactgactcaagtgctgggaagatgagtggggcaggggctaccacacagctgctgtatggagcaggcactctgggagagtcttgctcccaacagacccaaagctgcctcagggaagaggagaccgaggccctgcatggatgctgtcgggaccctgcatggatgctgtcgggaccctgcatggatgctgtcgggaggcctgctctgactccatgttactaacaagaaactctttatgaaaccaaagatttcgtgcgtgtttcaggaccctggggagagagaaagcccagaaatgaacccattctgcagctctacagaagaaaacagaactagattgggaaacagaactagattgggacagtggagtgtcaagaaaatgagcaagtgagtcaaatccctgggacccttgcacagtcagagcccaactaggctctaaagcgtgcactgcagccagccctgcatttcacagtatgggctcaaccttcaggctgaggtgcacctgccaggaaatggtgcttacctggtccctgcctcccaccctcacctcacctccttccattgtccccctgcagtcccctttatgtctccttgaacaggccgagttcactcctgccccagggcctttacacttgcagctctctctgcctgaaatgctctaccctcagctctgtatgtgatataccccatgttgtcattcaggtcccacatcaccccttcacagggtcttcccttaccacccaatccaaactagacccccagtcattctagcaggtcacgctagttgagtcccttcatggtagagtctctgactttctcttcgctacccgcttgcatggcgtttccttcctcccccactagaacatcacatctgtgagagcaggaccacgtcccactgttccttgctgtctcccagtgaccaggaccatgcctggcacagaacagatcccaatccatttttcttgactgattgaatataatataaaaatgacctttctttctaaagcaataccccctgccttttaaaataatataaactgaacacatagttcagaaaataaaaagacccaaggaggaaaagaaaggctttgcagtggctgttgaagctgaagataatagacacacaggcccaaagcctagtacatcctgggctccagctaatggtttctatcattctcccttaagcttttaagttataaatatttcaaaactcagtggaatgggttccccattcatcttttagaaaaaacaacaaaagcctaattctttcttgaaatccaaacctcaaatgaatttggaacaagattgtttcaagctctaaatagaaaggaaaggtgactccatttagtattatattatttgtaaccaagaaataacagaatgtaatttgtgactctgtcaatttcctctaataatgtgtagttgtctcaccagatgctttttgtaggccgatactataacccatttaaacacatttactcagctcccttaatgtactttggtgaagctacacagggaaggagactttttttaattggcataacttatttttggactgtgagtacaaagatagatactggagggcaacatagacatttgtgtaaagattctggttttgagtaatttctgtgttttaggatgtgacacagtaagtacctgtgtgcatgtgtgtgtgtgcacacgcaagatcatgcacactcacatggccactgctatattatggtaattgagagcattgagaagtctgaaaaatcgccccttaatggcacagcacactgtcaggcacatagtacatgttcaataaatgcttgctggactaattaactcacttctaaacaaggaacttacacagtgacacttcaccttgcttcttgaaacctgacctaggttgcaatctctgagtgagaaaattttaagtatctcatactaagtacatttggtacccatatggtggcagatgacactggtgcactgcctatgaccccttgacccttagtacttccttgtatttccaggcctgacttccaaatgccagcacctagacatctttgcctgagagctttcttggcccccagagagcacacctcccactgactgccaggagctggaggattaataccccagctccctcacccctcagggaggctgactctgaggcacgtgatctatgctgtctgccagagctcctcagtggcccctggtgtgagctgatttggtggtaacgtcctccttattggttcccttctcttccctgccttctccactctcctacttgtgcatcctaaattcatcttccaatgaaacttcgcattctctgctttgggatcagcttctgggggaatccacattaagagagatgcctttaataatttcatctctagcaaaacactcatccacataagcacacacttgtgcttgaaatggaatgaagatgagccgatgtcatcaaccagcatgtttctgtgtgaaatccagatgctatctgagtctctaacgagacttatgaaccaggatgaagagcatgtctctttcctaaatgaggacggtatggtggccatttaacagagcatccctgtcctcatgaagctgacccacctacattcccaaggtccctattaattagacaaaggatgtgcaagcaaagaaaacattttaatgaaggcttcgttggcaatgccagatgggtcaactatggtctaatccaaacaggaaccctcacccttttatcatttgctctaaaatatcaaagcattacccctacagtggccccaaatacattttatcccatcaagcctgggcattttaagagctcttctctcctgatttcttcttgtctgactttgtctttccaatcatggtctccacgatcacagcggtttcttcatatgtctgaatgctctccgtggaaatcttctcgatagattccaccacttccactgtcttataggccaaagccttgggagggcctttttctggcaggcttctgctcctagtcccaagcacctcagctccatcctgatcagccgcaggctttggaggctcaggtatagatggttcctctgcaccgggtgtgaccatggcacagggtctcctggactcttcgtcccgctcctcaccctcacgtttctcttcagggccttccagctctgcaccatctggctcaatctccttgtctataggctgctggtcaattggttgtccatcttctttctcctgcagacccacctgcccattctctaaagggggcttgggtgactcaggagagggctccacctggccgtcataaagcacagagtcttccgcaacagaaacagccaccccacctttagctgtgatggaggagacatagaatctagggtccacgtaattggcatcccctgtgaccagcacgtgccgctctttggtgtagagctcagtgggggtctcaggctctttggggcttctcactttctccttgaccttcctgtatagtttcccaaagcctttgcttatctgccctccatctggcacatcctctggagccccttcttgtgtcaggggacttacttctttactttctgattcaaacttagattcactttcctctttaagtaccacctgtaccagctttgtgtcttccaaaccttttaatggtgcatcttccagagctccgttggttttgtcttttgttataatctcttttctccttggaacattcttggggagggctttttgtcttggttttgctgctgttatatcctgcagagctctggtaagatctggaaaaacacacaggcagaaattcaagtataattgtcactgagagagaaagaaaatacgctggttggaaaataggctaactctctcggaaacaaacgcctatagtactagggtggggcttccttcatctggagcagaagcaatggaagaaaggccctggctttgttgctccatggcccaggctgaggtccagctgggcgactctggacaagtcactggatgcctttgggcttccagagggaaggtgctccctgttctgacacccacagttcaccaccacaccaggcagaacctaccaaggtatgcaaggccattgtcctgacactcaatgggagccctagcccctgttcccactgcagccccactgagctcacagcagacacttggatccacagaagcccattcctcaaagttattctctcctctgacttcctcaaaggagagacgacagagctacctgggggcttctgacatgctcagatggccttgggcctggagatggaacccgttcacggtggatctacctcattccataattagctcaagctagataaatgccacccggctgtgatcagcctccccttcctcccaggccaagagaagaagcgatgctatgaaattcagaaatgacaggaatcccctgccccaagtccaccctcctgcttccagactagctgaaaggaaaaactaaaagttgaagaaaacacataaaattctcacctggtataatctatgaggcttcccggctccacccacatagtgaattttgaactttttcagcccaaaagtcatcccctgcatcccttcccactggtaaccacagggcaagaccgatcaagcaccggcatcaagcacggctgattcacaataaaaagagagccaggtgagccggcaacagcagacatgggtcacaaagccacaggtgcaagggatgcagagagggacagggcacaggaaaactgctgggaactggtatgcgaggaggaggtgcttacaggactgcacagaatctcagggcccagtgccaaaaaaacccacaagaccccttgttccaaattattaagaacttcagaacagcattagcagagcattcagccaagctgggaccgttctgagagcaagcccctgcagggccgctcgtctgcagacctggccctgggcgtccagctgcaaggctgttccctttccaaccatgttgactctggaacaccatttccacaaagccctctgagctatctggaaataaggatttcaaggccctatatgcatgagcatccatattaccaccttctcttttctccccaaatgctgcgcttgttcagaactgggagatttcgatgtgaggtgaggtcttacagaccaaatgttgaaggcagatgccacatttaccagccaagctgtttctgcctggtttgagggaggggagaatgagagatgactgagcagccactctgcactggacaccatgttacacgcgttggcacaaaccctttgattcaatgtggggaggcggtgggatgtgatccagtgttcacttactgccgagcggagggagcaagaagtgaatattgagttgtactttttgcccaattaaatgccttgtgttgcaaaagttattgctgtcaaaccataaaacaaatataaaaatacaaaataaatgcctcacattagggatggcatgcccaaggtagcctagccccctagtcgatttttctccttataaacttctcagctcagtcacttagcaagccagagagggcagagggtgggaaggagtcctccttcacataaaagcatttaatttccagatggatctgaagcaagcatgaatgttaaagtcaggaagagagccgcttggtttttttcaagacagaaaaaaacagaagtccagtgttggggagcgttacctttcccaccggatccagtgctgagagagactccatggctctgggtgaacaggggaatgggagtttcaatgaaggcagaggtcagcctggcagaaagaaccagaaagaacaagccaaacagaggtcaggggcaagagcgactctcgttaatgttgagcaaaaatgaaaaaaaagctttctctagaccaaattgctcacgaattagatatcattttaaacagacagccatacacacatttacatactggatgaggacataaaggaagtgatcatttctttgagctcaagagtcataaactgtgaaacatacctataaaaaattgtaaagtggggattgcttataacctaaaaatgccacttctccatgagacagtgccttttttatttttttgccttttgtttttttgcctttttgatttttttagttagagtagtcaacccaggctgaagtatttagggcaaacagagtatgatatctccaacttaagatatatgtatatatacgtgtatgtatatatatatacacacacacacgtatatatacgtgtgtatatatatatacacgtatatatacgtatatatatacacacacgtatgtatatatgtgtgtatatatgtatatgtgtgtgtatatgtatatatacgtatatatatacgtgtatatatatacgtatatatacatatacacacacatatatacatatatacatatatctactcatatatacgtatatacatatatacatatacatgtacacacacacatcatatataaatagagaaaaaatgataaagcaattgagataaaatataaacaactggtgaatctggagtattcaggagttccttgttctattcttgcaacatttctatcaatttaaaattagaccaaaatcagaacttatagataaataaaagaggtatccagtcacctttctgtgaagccctgtcccaaaacaaaaatgtttacaaagtcaccgaaatgccagctccagacttattcttgcagatgtgtgcatagtgttcactgtgacataaatataatgtggaatcatgccagatacaccgaccagcactggagaaagaaaaataaaatcctgcttctcctgccaagcattcgagtgctcacagccaagagagagcacccagcgcgaagggaagagctgctcctggtggggacctcagttgtggggggcttctcttttcattcagtcgaaacccaggaatttagcaagactgaagtgaagaatcacaaattaattcccaacccgttctctggaaatcaccgtagctatgaataccagcatagctggagagaaagagagaatttcccagctttcttaaagtgagtagggatcgactcacagctccattatggagaagaccagacagccacatagtcacagccacagactgactcagcaaggtgctaagaattgtgaggatggcagcaggagcatcaccaacacctctgagtgccctcaagtgccaggctccgtgccacgtagctcacctgcagcacctcattaaatactcctgggcatcccacctgctgggacacttatgtccccagaggcctatgagcaaaacacaggcttctcagtgaggccttttctgaccaccctacttaaaactgcaagcattcccccatcacccctattgccaccaccctcctccctgcgggaacttcctcctcagcactggtcgtaccttcatcctctgtctcccctactagttatccaacacccatggggtcaggaattgttctgtttccttccctgacacatgcccactgcctataactgtgcctggcacacaataggcactcaataaagagttgtggaaggaataagtggcctggatggggagggcacacgctcacctgttgccttcaatctcgatgatacgatgataccggtccagctcattcttcagggtttgctgggcgaccgccagctgccggcagtcgtaagaagacttctccaggacccgctctgtctcctcaatctccttgcgcagtgtctcaatctgctcgttataaagctgaatctcatcgtcataacactcatgggcacttttaatagcttgttccagagttgttgtctgtgggcaaggacacgctgtaagaaaatccatcccccttcttctctaagagacagacctcaccaggaaaaggaacctggactcggtgaatgttttatgttgtttgtgtgtttctctgtccattcgagattagcaatgaatcactttggaatccttaagctaaaaagcaatgtgaaaactgagctcctgtgtccttacacaattttttttttttttttttttgatagaggatctcactttgtcaccaggctggaatgcaggagtgcaatctcggctcactgcatcctcgacctcccaggctaaaggcttccacctcagcctcctgagtagctgtgactacaggcaagcaccaacatgctgggctttttttttttttttttttttttggtagtgatagggtcccacttcgttgcccaggctggtttcaaactcctggcttcaagtgatcctcccacctcagcctcccaaagtgctggaattacaggtgcgagtcaccgcacccagcccttcttgcactaatatcagcaccctctgcaattagtccataaggaggcccaccccaaaggcagtctgaagacaaacctagaaaataaaacgaaacctaggccaggtggctcacacttgtaatcccagaactttgggaggccgaggctagcagatcacttgaggtcaggagtttgagaccagcctggccaacatagtgaaaccccatctctactaaaaatacaaaaattagctgggagtggtggcacacgccataatcccagatacttgggaggctgaggcaggagaatcacttgaacctgggaggcagaggctgcagtgagccaagaccacaccattgcactccagcctgggcaacagagcaagactctgtctaaaagaaaaagaaaaaaaacttgctatcggtggaataatatgtataattcaaataaagtacattcttcagactttaatgaacaagcataaatctgatagcaaaaaaataagtaaaaagaagcacatactaaatagataagatgctacctttattgaaatactgagtgggagaaaagtttccttgttctcattcagctttgattttctcccgagtttggatcggcagagttacatttatgttttggtagctaaggtgtatgtgtgtgcccttgtgtacacataaaataatgtcagagaaatacagtacattaatcagagcaagtaaaaattaagggaggaaaacagaaagagatagttttatattcagtgtaagaggttgtgatgatacacaaagacccacaaatgctcagtcatgggccacataacagtactgcagtcaacaatggactgcatataggatggtggtcccataagagtacaatggagctggacaattcctgtcgccttgtgacaaccgcagccatcctagggccgtggagccatacgttcactcacatgtctgtgaggacgccggcgtaaacagactgtgctgccagttgcataaaaaaaagtctagcacatgcaattatgtacaacacataatacttgatgatgataataaacaactatgttactggtttatgtatttacgatactacactttttctcattattttggcgtgtagtcccacttttaacgagatgtttctggtaagacagtgacgccgcattaccccagccgcagcctcctacagctcacgtttcccacagctcttgattgcaatattttctcttgtgcttgatcaagtgttattaaaaaagagtcaagaagcttaaaaaaaatttaaactttataaagtagaggccgagatatcatgattcttttccaatctcattcttgagtaggaaagaatttgacacgcatggtcctcaaaaacaaaacaaaacaaacaaaacctcacttctacctagcgcagcccttctggaagccagggtgcactggaaccacctgagggtgttaagagtctgactcagcagggatggggggccggagactccgccttgctcaccagttcccacgtgatgttgatgctgccggtccatgggccacacttcgagtcacaaggggcaagacacacatctatattcaacttcatgtatgtccactgcaggcatttcctacatccagacctaaatgtacctactggacaccctggaagatgatcattgccatcaaaacccaattcttcacttatacactttatgcccttggatcatgaaattccttaagtgaaaatgtagctttcaaaggtgttcggcaaatggccgggtgtggtggctcacacctgtaatcccagcacttaaggaggccaaggcgggcagatcacttgaggtcaggagttcaagaccagcctggccaacatggtgaaacaccatctctactaaaaatacaaaaattagctgggcgtggtggctggtgcctgtaatcccagctactctggaggctgaggcacctgaacccgggaggtggagtttgcagtgagccgagatcatgccactgcaccccagactgggtgacagagcaccccagactgggtgacagagcaccccagactgggtgacagagcgagactctgtcaaaaaaaaaaaaaaaagcaggtgttcagccatagatctgttgcattagaagggaggaggaagggaagaaaaggtacgtgtgctaagcactttggggagatgtctgtccagtccacgttgtccctgtgtctgatgtcagccccacccatccaaaggcacggtcccagcaacaagatgaccccactctcctgtgcagagttataggaccaggggtgggcctgacctaggctggcctgtcacatgccttctctcctgggaatctggaaaggggtctcagaaatcgcagagttggtgggaggttctagacaacagggacacatgaacgggtctgaggctgccgctctggagtggcgagctttcatgtgcatggcaaagttgagaaaggtaattatttggagaggaaaagaaatgaagccgaaaggcaaagacaaacagaaattagggagccatggcaagagaaggaagagatggaaaaggagacggagagcggctgcctcagctcccagttcctggttcctgattcctgatgcacacctgctctcagatttcatgccctgccttttataccctgctcctttggaaaaaaaaaaaaatagtacctttccggtggagaaaactggcagacagcaccttaaccaagtgatcagagttattgtcacctgtatgaggacacagccacataacgaaatactcaggacacagcgtcactccatgggggtcttgccaagaatgcagaacctccatctaatcctgagaaaacatcagggaaacccaaaaggagagacatgccacaaagccactggtctgggttcttccaaagcatcacggtcatggaagacagagaaagactggggaccatcccagtatgggggagacaatcaagacatgacacctaaatgtgagtaggatctcgaccaggaaaaaacacgcgtggagcaactggtgagattttagtgcagtctattaatgcgacaggatcactgttaatttccaggtttttatcatcggcccgtggttttgtggaagttgggtgaggggtatatattggaagctactgtgctgtttttgcaacttttcaaaaatctaaaattacttctgaataaaacaagagtccccttcctgtttcagctagtgtgatccagtttctgtttctcccaagaaatctggattcaaacagtcgcctgtaatagcaaatacaagtcagacacactaacgcctggtgcagccacatctcacccacaccagagtgttcagacactccaggaaacactttcaaggaatatggggattgaaaagacccctttgagccccaaatctcaaagaagtgttggaattacatggtgagggaagtgtgtggggctgtagagaacatagaggggccatgtgttgagggatggggcgggagggctcatgagacagactattctcacttttaatttttgagacaggcagggtctcactctattgcccaggctggagtgcagtgctgccatcaggactccctgaagcctccacatcctgggctcaagtggtccccacacctttgtctcctcagtagctgagaccacaggtgaatgccaccatgcccagccaattaaaaaaaaatttttttttgtagagacaaggtctaattatgttgcctaggctggtcttgaacttctgggctgaagtgatcctcccaccttggcctcccaaagtactaggattacaggcgtgagccatagcacctataatctctcacttttctatgtttgaaatcttccataataaagagtaaaagaaaaaattacatatgaagagaatgtaccccagatcactgacccaagagctctggggtggccgttccttttgggtgtgggttccccagcccagagcgggggtagtggctcatgctgataagtcctaagctgggtcaactcatcaacctcacaacaaccttatcagggaagggctgtcattatttccactttacagatgaggaaactggggcacactggcaaagtggcttgcccataaataccacagcaggattcgaatctacctgaacaaggtctgaaacacctcccagaaccaggccacccttgccctgcacctcagcctcctccctgctgcaggcaacaatatgcaagcacacacgtgcgtgcacacacacacactctgtctccagggcccctgcaaactccccattcccacacagcaacaggccaacaccagcctgttctctctgaagacatgggaaagtcagtgtgagccatgcagagacctctccttgcaggttttcacttagcaaagttttaaactgtaaatagaaccacaaagcatcacagaatgggaaatgagagcccaggaaagtcacctgtgatctttctaccctacaagtggagtgcaatctttttatgtctcaggaagtggtgattgttgtttttgtggtagtggtagggggtggagggatggggtgttttcttgggtgtgcatttgtgtttgtttgaagaaggctgcatgttttaaaggctggagatcctctgctggaacactgcgggaggagctcctgtcctgggcgcccccacagcccccatcccccacatgaccatgaggcccagagccctccaactccgtactggtcgcagatgctctacgggattctgctgagtccagtgaagtgatgacttggtttataaaagtggactgatgtctataccgatgtggtttttacagctccataatttaaacctttcatcagaaggaagagtgttcaggaaaaccagtaagagctcctgtctcaggagctcaacaggaatggagatgcctgtgacgagagccactgtggcacggcgtccactgccacccagcaccagcctggccgaggagaatgagacacggaccctcctctagaaggccgcagtccagcaggggaggcacgcccagggcatctcagaggaagaaaggggcttccaggaggaggcaggaccggtcctgggaaccgaggaaggaaagggacttccagaaaggagagaaggaatgagcaaaggggaggtcccagaaactgcaggaggggtcaggagacgaagagaagagaggttggcccagggttcctccaacggtggggccatgtggcaacctgaactttatccggagccaggtgactgctgtttctgcctggaccgttagattgcctggtttatatctgtctccccactgggctgtgagccgctgagggcacgacacaggcaggagcctgacgcgagccccatctggaggggtgagctctcacctcagtccttaggaccccagacacctttaggtgtaaggttttttttttgtttttgtttttgtttttgttttgtcttaaaaaaaaaaaaaaggaaactcattacatactgtcttacacaaactaaaccactagatggtgctaagtgactttaatgagaaatgagacatgggcggttcccactttgcaattttaaaaagtgactttctttacttccctgtcacagaaactctcagtccatgcaatttagggaactagaattacctgtcctttcctctccacctgtccgaagtgcttcctccggggctcttacgggtatatgtgcacttatttgaaggagaggcttccagcttccagctccaagcccaggcactattctcccatcgtccgcccagcgtctcccagactgagcccgcagagccacgtggagggcttaaacaaggcgcaccggcccgccccagagctcctgggtcagtggtctggggtgcctgtgaatctgcatttctgacaagttcccaggtggtgcccccgctgctgggacggggacctcaccctgacgacccctgctgtggagagttcgggaagcttcggacgccctaaccataggcggaacccgctgccacggccctggtgctagcagacgctctctctcggcccgccctccaccgagttccggccacagagcgggccctgcccggcggtgtgcggccacatcttccttcagctctagcttagctgctacattgggaagccactaaaacctttaaaaccagcaaaaacccagccacaaacatttgaaatgaggcccaagcctgggacacagggggaccaggtggaacattcgcccactccctgggacccgcccttaccctgtggttctcagtgtggctcctggaccagccgcagcaccatcacagggacacctagacatgcagcatcccgggccacaccccagacccactgagtcaggagctcccgggcgcacccagccacgtctgggttttcatcagagctaaggaggcagaattttggcccccgtgaccttttccccttggtgctacacccttgaatatgttacatggcaaaaagggactttgcagatataattaaagttcttaatcagttacccttttttaaggaaaggagtttattcaagattatcccctaaaaacagaagtcagagaaacgtgtaagtccaagtcattgagatgagacgcaggaagagggttcagagttcgctgccggctccgaacgtggaggggcctgaagccaaggagcctgggcagccctgacagccactcctggccagcagccggcaaagaaacagggtcctcactcctgccaagaacttgaatgagactggaagcaaattctcccctaacagcctctggacaagggcccaggctggccaacatctttctttctaccttttgagacccagagcagagaaaccgataggacccacccagacttcccacctacacaactgcgatgacacgggtgctggtggtgactcatcaaggcagcaacagaaaatggacacagccgtgtttcatcagctacatgctatagcttgttactgagtgagtataagcacatctgtcattttatttaaaatgattcagtaatattttgataactgttttaatataattagtttctttttttttttttttggaaacggggtctcattctgttgcccaggctggagtgcagtggctcagtctcagctcactgcagcctcaacctctccaggctcaggcagtcctcccatgtcagcttcctaagtagctggaaccacaggcacgcaccaccacgcccagctaatttttgtattttttgtagaggtggggtttcgtcatgtggcccaggctggtctcaaattcctggactcgagcagtccactcaccttgccctcccaaagtgctggcattacaggcgtgagccaccacacccagcctggtttcctttaaattatctgtattttattttatgcctttaccatcatttttctgagaagcggtctccatcagaatgccacgggtgggagtggaggaggcagcacagaagagatgtttgagaccctgctttagagacgagggcagcagggaaaagccaggaagtcctcctgcagccactcaggacagaaacaggcggccaaccagcggtttcatttcatgttctcagaaaccaggttaatctgttgtgaaatttcttattttgatattcaacaaatacctgtacataaagagaggaacattctttttgtcctggaactggaatttgccatctaggctgggctccttcatctttctcagtatctctagggcagtggttttcaactttatcaccaccgccccaggaaaaaccacatttctcattgcgagccatacacatcagataggtaggtgtgtgtgtgtgtgtgtgtgtgtgtgtgtgtgtatttcaacatatccatatggatatagagagataaaacaagggcttcacaaaacaaatcctccctttcacttgctgtacactctgtttttcttattatattttagtctagcattttgttgacttccttttacatgccagtcaattctactgagttcattttacatccaaaaatgagttgtcactagccatttggaaaacactggtctctaggaccacgactgggcttgtatccacgtccctattcacatacacagcacacacacatacacatgacacacacacaccacacacacttcacatacacatcccacatatatcacacataccatgtatatcacacacacacaccccatgtacacaaacacatacaacccttattctatcctgtcagagcctcagaagaaaccacacaggccccagtcaccaggatgaggcacatggtccctgagccagggtttgtctcacaagaaggaggagttttaagtgccttacttggttcctcctgctgcgatcgtcagttcaggggaccaccacagacccgggtttgctttccagcagcccctgagagctgctgcactgtgagttttgtgtggtgcgtgctgggatgggaattaggatgtgaactccaaggtcccaaaatgaaatcctgagcagacatgggggcactggaaatcaataaaaagcgctacatctagttgtggcttcacatttttagacagagtaacacataacatccaaatggtccaggctttctgaagtgtccgatttttacacgttttgctctcttgtccccatgtgtacttgtcaaaccaaatgtcaacttactttttggtttgggaaatgtggttagagagccatacaaaggtgcagtattttaacccaagcgtccctgtggaatgacctgctgtagggtaatgagaaagagagagaaccggaaggaacaaagaagatgagccggcaagtagccaagaaggcacaggccacaggacagtttggggcttttctgttttgttttcaaattaagcttcacccaaaaggggtgggggtagaaatgtgagctttccaccaacacgtttctaactagaagcaaacactgatacaaccactcttgccgggttgtaatcaaattccgaaggagaactgttaccatgagaaggaaaacagaagcacagatttgaacaagtggaggataaaaatccctatggtgtccgtttcttcttattcttacgaagcttgacctgggcaaaatgaatgcatgatgtagacactggggcagcctaagcctaagactcggtggggagggcatgactcgaaggagtcccaaggggcacctctgaggggccaggaatgagcgtggcacctgtgtcccccagctcaggactctccctgtgtcctggaaaactcctcagtccaggccagagcagagcgcttggccacccactcagaaaaccccgtttctgccaggaacataggatatgttcagcgtgtgacagctcctcaagctgcatgcgtgtgcctgcgcgtaacacctccatgaaacatgtgggaagccccaatgcacacgcggcagactcgagcgtacctgtgcctgcagctccactctctgcgcctgcaggtgggagagcacctcccggccctcctccagctgactccgcagggcggccacctcccgctccgtcaggagcttctcctgcacagagaaggccagagtcagactcatgggacatgcagagaggaaaagggcagagaaggtgcggggccctggtatggacggaatatccgtgtccccctgaattctgtgttgaagccctaactaactcccaagatgaaggttttaggagacctttggaaggtgttagggttagatgaggtcatgaggatggggggccccatcatgtgattagggtctttgtaagaacaagaagagacaccagagcccccacccccaccccctgtctgtctgtcacgtgagacacagcaagaaggcagccgtcttcaagccagaaagagagccctcaccagacaccaattctgctggcatcttgatcttggacttccagcacccaggacagtgagaagtaaatgtctgcctgtcggccctcccatctgtagtgtcctgttatagtagcctgagaagactaagccaggcccacagcacagccatcaatgccttttgctttgtcttcaaagtctgaacctccttgggagtgtgacatgccgggaccaagtaccaggagaccagagcttagacctggctgtgccatgaacctactaagagactctagaaaaggatttgactctcaaagcctctgttttcccttctgtgaaagggaaaacctggaatgcacactctcgaagaaaatgaaggctggttggagccgcgagccatacgctgtgctcggatgtcagcgcagcacaaagcaggagccatcagccccagtgggtgaaagggaagtgacgctccagggaatggctagaaggaaatcctctgacctctccacactctgccaagcaggtccctctctcctgacctgcctttccacgtctattcaaaaatattcaaattgtttcacaaaggcctgactgctcaagagccatgcattctgacacagagcacattgactcgaagccatgcaaaatcaaacaccaagtctacaatgagggtttctgtgtccagaggctgcatggaagacagcctctgcttcaaacaccttacaaagtggctgcagcaatgacatagacatacaggaaagtgaccgtctaacttgattgtagaattgctaagctaagactcataaagatgtgacactttctcaatcggtgcttctctatcctgagcatgcacacgagtccctgcggatctggctaagatgcagattctgcctcagtgggtctgaggctggactggacactctgcacgtctcacaagcccagacgatgctgatcgatgacatcaaagtcagtttagtgtctgtatacttatgacttagaagggtcttattacatgggaatagatgatacaattcaaaaggtatgctcggatgtaaaacacctttgagttagagttgggtttgaaaaataaaagtaacatctctggaaaggaatctctgggaaagaaaattaaggcttcaggaaaagtttttttaggcctttgtagcaacatcagttacatccactaaggagaacaggatcctgaaatggtaactggtgggcaattcagacaagactatcctcatgaatgccaaaaaaagtaactttcctgtcgcttagatgatactttgcagggttcaaaagtgtcttctaaagcaaatttggggatttctttagctttgtataaaataattaagacgaaaaagttcaggcagccggtgaccccagcccatgggttctgcagcagtttgtctgcatgctggtcctgggcaggccccacctcctgggaagcccattcattgactcggagcatggcctgagcacacatctaggcaatttcaagtgtcaccagggttgagagccaccatcctaggtcatccttgcaaaaagacccagaaccttatctcttgaccaatccaccaaaccctgtagtagcctaccacaacctctgaagaagggacactgtaacatttttatttaatttgcatcatttccagtgtttgtggggtttttttgcttcttgtttgtttgtttgtttagagatggggtcttgctatgttgttcaggctggtattgaactcctagcctcaaatgatcctcccacctcagcctcctgagtagttgggattacaagcatgagccacctcactcagcaccagtctatatatatatatatcatgctatgcatcacaaaattccataaaccatattaggaaaagcgttactatcccgttgagcagctagagagtcaaatgaagaaggaatttggaacataatatcagaagtaatttttcatatccaaatcttaatttttacaaattggcttcaacaatctctatcctttcccactagtttcaatgccacaggctcacataatcattagcagagctccgtcttggaaatatattcactaattatctgagattatctgtatttgaaattcattatcagattgatagggagaataaggaaacaaaccaattttttaaatgggcaagaggcttgagcagatacttccacaaagaagctatccggatggcagatgagtgcacaaaaggatgctcggcttccttagtcattaggggatgcaaattaaaaccaccaccattagaagagcaaagacacactacaaagctgacataccaagtgctggcaaggacaggaagccacagaaaccctcacgcattgtgggtggagatgcaacaatggcacatcgctttggaaagcagcttggtcatttcttataaagtatgcaaggaagaacagctcataattctcaagagaaaataccgaagaaaatggtcaaggatgcggtttacatcctcacatgtctaaatattggcatttacagtacaagtaaaatatcagaagaagaaacttcagatgagaatacaaggcaggagtggggagtggaccctggtggccgccctcacagtccaacctgtgagcccttccctgggagtctccaggtacagcttccctccagggctggtttgccttttcctgcttcaattcttacctccctcatcccactcgtcacaatggatgctggaggagtggtgtggatgatctgctgcaggatgctgatataggtctgaacttccagaagattctgttgggggagggaaaacattctcattataagttgagctgcgctggtttttccttctagtactagatgagaacaggaatggacacttccgcacgctccctcatcacagacaggacagaccatgaccaggttcaggaggaagaagagactgatgcatttgctgccatgggtgggcctgcccacatgtgcaccatgctcattcctggcacctcagtctcctttaatcttcacaagaacaacggggccgatgaataaactaagacttgccttatttcactgtttctcttcagttacattggtgcattggtcttcacaaagccctgggtggcggaggcacaaaaaaaaaaagagaaaaaaaccagccctcaccagacatggtggctcacacctgtactcccagcactttgggaggccaaggcaggtggattgcttgagcccaggagttggagaccagcctgggcaacatagtaagatcccatttctacaaaaaatgttaaaattagctatgtgttgtggtgtgcacctgtggtcccagctacttaggaggctgaggtagaaggatcacttgaacctgggggtgggtggaggctgcagtgagttgtgatcaccccactgtactccagcctgagtgatagaatgagacaccgtgtcaaaaataaataagttaaaaggccctggagggcacaaaggaccctttccaacaccagcagtgtttcaaagaatgggctttggtcaatcaggcctggactaaaagacttactggctatgtgtgacctcaggcaagctatttaaacctcctaaaatgcaagttcttctgtaaaacagggataactatctgtagggatgctgatcccctttacccgccagtgcccctgtccccagctctgtaataacagatgacacagccctctccagaaagcagcccttggccaacaaatggtcatcttgtccaggaagctaccaggccctgcctcatccccaacccaggccaacgactgacagcacaggagtacaaaagaccaactctctcaactccttgagggacccagctgtggtgtaattcacattcacactccagagcttcctgtgggatcatgagaaggccacagctggactccggctgaggacaagtccttgctctgctccctgccctgtcctgcccttttcctccccttctcagagccctccactaagacatcagtgacaaaaaatcactacctagagctctgcttagaggaagcctgacctgagcagtatttcacaaggctgctcttgggatccagtgagatactacagggaagcctcacagtgtgagcgatcatcatcaccgtcatcatcatcatcatcatcctaaatggcctggaagaattatttgagctgcttcaaaactggcccaggcactgttcccaggattccatcaagtagggtagaagcaaggaggtgggtggggaggaggaaatggctgggcctcatggaaagttggagggaccctgattggagcagacaggcctggtgtactgatgcaggtacacactgaggtaggaagggaactggaagttcactgagcacttgccaagctccaggttgtacccatgttcccacattgtcgtagtttgggtttccccagaagcagaccctgagagagggatctgagtgcaaacagttgactgggcagtgatgccaggaaacatgacgggtggagtgggaaagtgaggcaggaagggagagcagtcagcgagggctattaccaatggatcaccactgtgggcacctggagctcaatcctggtgagtatctctgggtgccaatgcagaacaaaagcctcagagttggtctacaaaggcgagagggagctggtgtgtttatacaccaactcccatcagttctggttgaggctgctccctgctcctggggacaggagttccccaacaccccactacaggcggagcagcctccagctgcttggagaaagtcctcaggcaaagctgcagggatggcagtgggaggaggccagagcccctggagagggaagccctgaggcacccacaggtctgctacactacttcacccacgtcactgctgggaaggagagcctgcatttgcattttgaagaagaaaaagcagctcagagaggttaggccactcacccatagtcaaacagctgcagaatctgatttttcaattatgccagggccccccagaatcaggcctgtgaggaactgttggaggctgggggagtctgagcactgcaggagaggaagctcctgaataatgtgctcctgcaattaacgggctcagaggcagagctaaaaacaagactttttcatgtattttctgagcggaaacagttgatggactgtagcttaatgaagacagatctatataaaatcactttgtaaattatactgtacaatatagatactagttcccaacaccagggccctcaaaacacacccactactgcccactcttcaaagcacatctagctcagtaagcactgtccagtgaccaattcacccctatttggttcgagggaaaacgcacaaaggtatgccactctagcagtctgttttcagccacagtaccctcggcttacctgatcaaacccaaactgggttttctagaggaagggcttcaaggggtcatgattaccttcttgtgcctgtcctttgccgcactgatatcatcttgcagaaattgggcttccagctgaaggcgtaggttatgcagcaaggcttcatcagcttcctgcaatgagagccacatatccctggccacaggcaccatggagcataggggtaaagctggccgggtatatgagcacacagaccacctgggagcttactgaaatgcagactctggttcagtaggtctgggaggggtctgagattatgcattctagcaaggcaatggcttagcccattggacctgttctagaagagcagttctcaacagagggtgattttgccccccaaggggacatttggcagtgtctagagacatttttagttgtcaccactttagtggtagggtccttctattggcaactagtgggtagaggccagggacactgctaaataccctacaatacacaggacagcatccccccacaaccctgcacacaaggaattcccttgcctaaagggtcaatacagccagggttaagtaaccttgatctagaaagatcggagcgctaggtatatttacataccaaataaagttaatatttaagtaacgtctatatttgttctatatctcatcatcagtgagttgggtttctaagactgaaagaaaaaaattgttttcccttaaatcctgaaatctgtattctagcagttttctcccaaggactgttaacatttaccttgagaagatgcatctttcatacaaaaatgcatttttagaatgactgttttgtgaatagcatttgtttgttcctctaaggttggaaacgacattgatcacaaaaggttgaattttctcaggaaactttctgataattcactggctcttgcctcattgatcttgtttggatagaccaagtaggtatgaaagaattattcatgctcttaataagattgtgctatgatgtccagaagtgacttatatactttggcatcttcggtgtgatattacaggtgagcattacttgggttcatcaggattccccagtctcccaagatacctctgccatgcacacctgccaacacctgaggccttgggaagtgaatttttactgacttattagtgacttgctaataaacataatgagtcttagcaatgggctctcattaatcaaggggaacacgtggtctgactaaaatatgtaagagacactctccatactcgcatgaacagagttatgacagtcacgatatgtggactggccatgagatgtagggacactccccacccttgtgctactagggtttcggtctggcaaggccttgagactgcactcttaagaaaggcacttggggccgggtgtggtggctcacacctgtagtcccagcactttgggaggctgaagcaggtggatcacctgaggtcaggagttcgagaccagcctgaccaacatggagaactccatctctactaaaagtacaaaattagctgggcatggtggcacatgcctgtaatcccagctactcaggaggctgaggcaggagaatcacttgaacctgggaggcagaggttgcagtgagccaagatcatgccattgcactccagtctgggcaaaaagagcaaaactccatctcaaaaaaaattaattaattaattcaataaaaataaaaggcacttggttccttaattgctcttgtgaaagaccactggtgtagtaagatttctgattgtctgatgctgacaagaaggatcctgaaattctgactctattgtagcctctgccttcaatgagctttccatgcaaagtgttctcttagcacctaagacaccagagctgagacttcatggagcctacagagaaggttgtatggaccttgggggcctgcatcacaataaatgttaatatttaacaaatctctttctgtgtgaatttggtctaaagcattagcaagatggtaagggagtggccaaccctcacccaactcaaacttctgaagctcttttatctacccaagagaactgaagattttatcttacagaacttgagagttgtacaagatcaaattagtcaatgtgcaacccttaggaatgtatcttaaaacatttccttccttttccattagccacctgcagtggagctgccaccaaaatgcagatttttgtgaaaaccctcacagggaagaccatcaccctcaaggttgaaccctcagatacgatagaaaatataaaggccaagacccaggataaggaaagaattcctcctgatcagtaaagactgatctttgctagcaagcaactggaggatggatgtgctttgtctgactacaacattcaaaaggagtctactcttcatcttgtgttgagacttcgtggtggtgctaagaaaaggaagaagtcttacaccactcccaagaagaataagcacaagaggaagaagattaagctggctgtcctgaaatactataaggtagacgagaatggcaaaattagtcaccttcatcgagagtgcccttctgatgaatgtggtgctggagtgtttatggcaagccactatgacagacattattgtggcaaatgttgtctgacttactgcttcaacaaaccagaagacaaggaactgtatgagttaataaaagacatgaactaacaaacaaaacaaaacaaacaaacaaacaaaatcatttccttttgcgtttcctcctgcctcagcctcccaagtagctgggactacaggtgcacaccaccacgcccagctaatttttctatttttggtagaaacggggtctcaccatgttggtcaggctggtcttgaactcctgacctcaggtgatccacccaccgtggcctcccaaagtgctgggattacaggtgtgagccaccgtgcctggccaactttaaactttctagaagtagccactttaaataaaataaaaagaaacaggtgaaattaattttaataatatattttattttacccagtatacccaaaatattatcatgtcatcatgtaatcaataagttagtagtgagatatcttccattcttgttttcagatgaggtctttgaaactgctgtgtattttacactcataacacatctcaattcgaactccccacattgcaggtgctccacagccacatgcggctggtggctgccatactgcatggcacggctctatgggagcaattttcggcaacggaacatcttgttcctcctcagtgctcctccaggtttctgctgcagggtgaatccccaggtaaggaactctcgacagaagaaggaaggacaccagtgtccagagtcattcctcaccccggcccctggactctcctgcctactctctccaaggctcctcctgattcctggccctggcaccgggctcctgctgccaccagcaccactgcccactgggagaagcaagagctcctgggaaaaccactcccttcaacaaatctacacgtggtctgaagtttttgggggtttttgttttaaatcagaaataaaagaatgaaccaaattacaaaaagggacacatttttccagatccaggacactgaactgtccaaactacaagaatatgaaatctaactatgggacttagcttctgagctcattcatgtgtttaattaattagccattgacctttaacgagctctgccttcagggggttaccattctgagcccttaatgatgggtcctcacatcctgcgacccagggacagtgagggagggtctaatgaaaactcagctatagcgtttcttcttccagaaggcgtgcgctacccggcccggggcgatcagacccagactgatgcactcatgcaaatcaaggccttcctaccgcaggggaagtgggcaggccccttggagatcctggtgtctggtcttctgaaatacccagaagtatttcacaagcctgggaagccctttcataagagaaatggtggaaagggaagcctgaatctttccagcaacagaaaagggtggaggattcagaaaaaccctggttcatttgtaaaataccagccagacctcaggaaagacggaaaccaaggcagttccaggaatctaagtagcaggagtcaaggacctgtcctcagagtgacccagctctgaatcagttcatccctgcatccctccctcaggagagctgtgattggccagcatgggtcacatgaccaccatcttgcctgacagctggaccacacgatgtgaaggaaaatcacagtgttcccggacgcatcccactcccttcaaaggcagtggttccctgtggagtgattctcagccccggggatgggaccacaccctcagagaggcttggctaaatctgggccagaggtgcaggagtattgggtggatgttgttctatcttccctctgcccctcttaagactgctgaggatggggtggggcacagaattctcaatcactcttaacaaaatgcatccaagattgagccacaaagctgaatgactggaaacagggcttcaaggaccctttgtgttattatttataaggaatcaaacattacaaattttagaaatagaaggaaccctggggtcactggtcctcaaacttttgttaagccacatgtgccatcctttgaacaaagcagtccatggaagccactgtactgaagcaaagccaaggggccacaggcatctcccatgctcagctgccctcttccctcagagacccttcaagcaactcgatgcaacatgagggctctgccaaatgcaccttgaagtccagagcctccctccatgtatgcagggctgaggccagactgatgcagtgcatcattgaactcgtgaatggaagttagtggaagataacaggcctggaacctaccatgggcttctctctcctagccaagagctgagtgctaagccctgactccatccttcgaggtgcctgtcattcttccccacctccctcctaggattgtgtcaaaaccaccagcactgggtcccatcagttaaatctttataactgctcatagtgatagtaaaaggccagtcaatatgtattcttaaaatagggattaagcagatgtttctgcaagcacactgtcctgctttgaagataatcacccgataagctgaccccaaaacccccaaaggtgagtagggcccactggaatgtacagctgctgatacgctgaggaaaatttgttttggaagtgttttcttttgtttgcgccagaactcagaaatgtgtagacgcttgtgtttttattatgctgtggatgttgtcagctgaattttcaaaagcttcaccagcagaatcatctagatttttctgaattgagattatgggtcaatagtctaattttacaaaacattccaactctgataattgcctatgtcctagatctagaccagtggtcctcaaagtgtggtccctggatcacaacacctgggaacggatcagaaatgcaaatactccagcagatgccagacctactggcttagaatttctggggctggggcccaggagtctgggttttaacgtgcccccccaccccgcccacctttcaccccaggtaacactgatgcacactgaagttttagaaccactaatctagactatttacagccatgtttttagaaaggagctggagaaataactagaatttggagcattattgaaaatcagcccttttttaactcaaatggtggggattaaaaaggaaaaaaaacagccttgctgacctattcacagggatcccagaaactccatttaaaacccaactgctaaagaatgggtatttaagttcattaagagttctagttagctggaatttaattaaaaaacacttttccttcaactctggatgtcaaaaacctttccaaaaatgttatggctgttcttccaggtgctaatgttggcctggagggcactggacaaattctacatctctccaccctctctcttgcctctgcctcagtctcctcaactttgctgtctctccctttgcattcatcctgactcttcctccactcctcttgcctctccacccccagactcctcctcttccttcccagtttcctctccttctcttctccggaagttcatttccgggctcagaggaattcttggcatacaaaggcatagccctgaaggtagggcttcatgcctgcaccattttatcccctaaactccctggcctcttgctgctttccacaggcacgtttaagagacacatgaattacatgaaaaagtatatatgtcagcctttaaatatttttaaaattgtttttaagtgaaagcatttgactagaaaccacatcattttaaaattctgggaattttaaagagaaaaggagagggagattttaaagtctgctgcttacagtttcctcaagataagcaaatcaggcatcatagcagaccagtaacttcatacgtatatatttggtgaccatgagatctagaagttagcaaacccaaatattttaaagtcacctggaattcctactacatcaaaaggctgagaagttgaataactttggccataggttgtaggtaacgtgttgaggagtttacttcacttctaagtgcacagcaaagagtggcctactataatttatctggctgataaaactacaggagctctttccgtaggcttgattacacgggcagcatgaagaaatgcatggtggttttgtgaaggcaggggccatcagtcctttcacatacactgcaatatcctccaagtaggatgcaaagactggatcagtgatgtcccacggccacacccagggatgaatcccttccacaagtcagaccaaaggaaatggccactgagactgagctaaaacctcgttgatctgatgtaagaaaatacccaaaacctgcaggccaaaatcactcacacgaccagctgatgcgatgtgaattttagcctctttcatgtcatctgatgatctcagcagagaacaaaaaggtccagtgttcacctggccctgcccttgagggactatttgggttctccagaagtggaccccaaggcaaagactgggtacctgtggcttatctgggaggtgatcccaggaagcacaggtaagggaggctagtgagccagagaaggaaacaaaaccaatgaaggaatgtgacgagcaggttgccattgtagacagctcagtacggctggggtccctctgagggaccatgtggaatgtggctctgaaccatcactatgaggggtggggaacttatccacctatcccagtccacagcaactgagggttgttcctggggtgttaacacccagcgcttctggactatactgatgtgggccatgcatgttcccagagcccgagatgcaggcagtgatcagggtgttcagcgtgtctgagtgaccactggcatggcccaaggtgtgtggacaggacaccaacatcaaggtccatggggccacctatagccgagaactctctggcttcgtgtctggcctctgagtaataccggttccctgactattctttggaggtagagaatgaaccacaaatacaaaagaccccaactcctgtctacacttaccacggctgagctgcgaggctctgaagtcatttaacctcatcaagggtgagtttcctcactggcccagagaaggatttggaataggtcatttctgagaataaaacctgcccccccaataaccacgggctgttctgaggctcccacaggcttgcacaaggccctccccagcgtcctgcatctgcctgctgtgtttatgatttctactattatccaaggaccacctgcatcttattcactctgtatttgtctttaaaggtactcattcttacgtaggtttatttggaaaggaatattttatgtcatccgctgtaaataacaggtaatcataaaaaattcacaactattaaatatcactcctccatgcactttctaaagtcacctcccatttcaacagggttctgcacccacactgtggagaaaaccaagctggtgtctgtcacatcaagtgctctgtagtaataacagtgatcagggattcagcaccaccaggtgatgggcaagtcatatacattattacatcatttagttctcactaggcactttcactcctatggtgggtggggagtattgtgattccatttcacagatgaaaaaaccgaggctcagagggacaaggcaattggcccacagtctcacagatgctcagctgtagcaggaggttcctagtcacaggctacactcctcgctggggctctgcagctcacctgcgggcagtactgtcttacttggacccaggggccagtcatgctaattgcctgtgctggtctcacccacattcttggtagcatctttccccagaaccttcataatattcttacagggctgatacttcaaatgtccacactctatgtcacaatatacatgaaggtgtattatgcgatgccttttccttatttttcgttatctatgttgccttattttttctactgagaatatggattgcttttgtaaaaagagaaaaacaacagaaagtttaagcttgttttttaaattcactgtcattttccatcaagggtaaaagaggaaccccattctttctcccctttatttgaagagtacccaggatggcactgcgtgagtgacaagtgaggacagatgctcacaaagcaacatgtggaagtgttggggagagggcctcggagggcctgaggggtgctgtgaagggtgctgggtccccgtgtctgaaggccatgttctggcagtctgaggttgcacaaaacagaagaatggggatgagctacaggtgtcagcagaatagcagagtgatgtcagacactaataaggcccaactcccagctcagatgtccaacaggctcgaggccatcgttttccaagccaactattgagcgtgtgtcctcagggccttcctgaagtgcattctcactgccatctctgtgtttctatctagggtgcccaagtgtcctactagctgtcctgagagtcccagcctgcattgactgacctgtgttattacaaactgcaccctcttttgcacactgtcctggtttgaacatatcatacgtgctcacgcgcagaggggcaggtaacatagacaaagcaaaattgggtttcccctagattctagttctgattttcccctcaaccagcagagtaatcctagacagcaaaggctggacaaagtgaagggatggcaaacatccggcgctaaccctgactgtccaaagaggctgcttggagttccatgtggcaaagaagcctaaagcatacctgggcatggcagggaagagtctgcggttttgtcagcaattttgatgagttgtaggcatggaaggggcggggaagggcagcccatgtgccctaatcaagcagcctttccactaaatagtctccatgggtcgttctgctctgacattggagctcaaaaacgatcagaaaagggccatgcttaaagctatgtgccatccctggttctgtacaaccctggtggtccagaatcattctgctttttggtggtgggattctcccagcaaaagcagaaaatccaatcagttagttagaatcatgatgaagaatcccaagaaggaaatcaccactgttctgtaaagagcaactccacataaccctgcaggaaagtcaagtggctaagaacccctggcatctcccctggggctattggtcacgctataagagggaactctagaggaaatagaaatttcttcctctgttatcttgagacttctgtggagccgcaatctcaaaactcttagccaataggacagaggtatcactgtgtccaaataaccactgcccaaagcaaggtccttcctaaatttggtgttgggcatcagtatgtctgacaagtaaaacagcagcttgtcactgtaacgccggcaggttttgctagcctagcataaccaacaagcttcatagtctgtgtttctctcgtgagagaggggtgtgtgtatgggtgtgtgagttcactcataaagactcaattgaaattaacaagtcaagagacagagtgactgcaaaagaagtagtgaccgccaaagtaacacaaagaggaagcctgtaaaacctgcacttccaccattccattcaacactgtaattaagctacgtaaacccaaggatgtgttccgctcaccttgttaagccgttcaagcatttcttttagcaggagttgacattcgcactcattttcatacctgcaaattggacacataagtgagagttgggtaactaccatgctttcacatgtatggatcacataatcagcattaaattcaacctgggtacgatgccctctcctttaaggagagggtcttaattttaaagtagtagctaacgaatgctgcatttcctagctgactgcctcccaatcagaaagtggtaccatttgcacaccgcgtggggtaaccaggggcagttagcggaataggagtctcccagcccgaaggcaccaaccccagcccctacagccttattcccagccaccccaaggatgagggaattatatcctagcctatctataacccaagtgcagcagtggcagagatgggagactgccctgcacaatctacaccaccattaacctgaccgtacttggatttcctatagtattttatttgctgacacatgtaatttgtcagtttttctggattatgtcatttaatccttacatcaccccagaagaaagcagttattgttagtgctgcattaaagatgaggaaactcaggcagatgctccgcacacttttccctcctcccagcagcatcactccccacacagcgatggcctcctctgggcaaatgggtggggcaggctggacgtgccagggagtcagggcctctgggagcagcccacaaactctgaatgaggcaaattggagcataagtaccccagctccttttctgctcggctgggacaactgaggcacgtccctctgggggaattttaaccctaaagagagaagattccttcctaaatgacccctccccttgttccctataaggtgacccccaaatgcccattcttgctgtcttcaggagttagagcccttgatgcttggcaagcacaggactgcctagaagggagactacattttccagcattccttgcagccaggtgtggccatgtgactaagtcctgaccaatgggatggaagcataagtctgcatggcagcttccagatacctttagttaagtaatggtgtatgtgtgccctttgcttctcattttccatccctccctccatcctgcagccagaaacatgaatgctgccttcctgaaggccacacagaaccttctgtgtcccaaatactgtacagtatcatactaaactgcttaaccagaccttacacaagtgagaaacattttggataagccaatgacattttgggtaagccagtatcactttttctgtttttttctgtatggcgggggggggggggggggggctggtaaaatatgcataacataaaatttaccaacttaaccattttaagtatatagtttgtgatagtaaatatattcataatgttgtgaaatcaccaccaacatccatctctgtaactcctcatcttgcaaagcagaaactccgtacccattaaatactaactccccattctccccatccccagccctgacaaccaccattgtactttctgtctctatgaatttgacacgcccaactaccttatgtaagtggaatcatacaatatttttctttctgtgactggcttgtttcacttagcataatgtcttcaagtttcaaccatattgtagcatatgtcagaattaccttcctttttaagggtgtataatattctatgtatcgaccacattttgtttacgtattcctttgtcagtggacacttgggttgcttctacattttagctattgtgaacagtgctgttatgaacacgtatatgcaagtagctattcaaaaccctctttcaattcttttgggtatatgcacagaaatggaaatgttgcatcatatggtaactctattttttaattttttgaggaactgccatactgttttccacaatggctgtaccattttacagtcccatcaacagtccataatttctccacatcctaacaaacacttattttctgttgttttttgttttgttttgttttttatagttgccatcctaattggtctgaagtgggtcaatgtcagtttggagtttctgtcctttatagttgaaagcaatcctaattaacactgagcccaatccacaaagcatagttttctgtgcccttgcatgcccatgccatgggttcaagtcaagtattctgcaaccatgaaaggtgctagaaaaccacaccaccatgttctcagaaggaaaagtcatgaactgaaggaagaacaattatgaatatgtgcaatgtgcacgcattcccagatctaaaaccatctgcgaagctgagttctatctaggaaactaaacatctctgcataagttttacatttcacatcaggatgttacatttagtagtttattttgtgtgttgcaataacagagccagaaattagtttttaaatgtataattagctttgagaataaaacttaataaaatctaattttcttattgctctttcctgctggaaatatctaagagtttccatagcttaagaacatgtttgaggatcaacacattaacctgatattgtgagtaattttcatgctgtaaagacaagtctagatattatattaaagagaagtgatttccgggcgcggtggctcacgcctgtaatcccagcactttaggaggccgaggcgggcagatcacgaggtcaggagatcgagaccatcctggctaacacggtgaaaccctgtctctactaaaaatacaaaaaaattagcagggtgtggtagtgggcgcctgtagtcccagctacttaggaggctgaggcaggagaatagcgtgaacccaggaggcagagcttgcagtgagccgagatcacgccactgcactccaggctgggtgacagagcgagactctgtatcaaaaaaaataataaaataaaataagagagagagagagagtgatttcactacaaagaattcatgatgtgtatattcatataagtatattcataaagtgaaaaaactggcttcaattaactgttttacataaattatttttagttttcaacaatttgaataattgactctgttgttgtattttgatagttttgtttttatttcattcttgttttattcagtgttttgtttagtctttgacctgttaaagacctgattttgaaattattcaactgccaggtagagactatgcctagcactggcatggaaccaagcctgcacatactaacccattgctgcattattttcccctggctttaggtagccatcaactcacctctggaatgtaaactccagcctggcatgtatgtgtatgtgtgtgtgcctatggatgtggatgagcatttctataatgattttcagttcccactaccacaatccaaatgtcaaaacttctccaagggggcaaagggagggaataaattaatatgaattttaaataaatcacagagcctgatggaactgcttcatgatgggcatataactcagaaccaagtgcaatcagtaaagaccaggaaaacccaacatggcctttccttcaactaggactcatggatgtcatgcttaccagccaaagtacagtagactatggtctaatgccaacacaaaggccatccagggaatcttgatggtccatcaagctgccccggatgtctgagccacagggcactttccccctttgctttggagaacatgagcttcatctgaatgaggtcctatttctgggccttaggctgcaggagtccaagaacggattatctcaagatacagtgttcccgaaagagcataggcccagggtgagaaaacccaggttcaagttctgccacccacaggccctctcccaggctcagtttccccatgaagttctgtaacaagtggattttcaggtcccttctaccagctccaagtctgtttctacagattaaaccccaagacaaaagagctgacaggaatcgaatcaataaatgtgatttgataaatgtgttcagaacacaacaatgaataacctgcccaagattcagattgagaaactggaactcaaacatagagcaggtttacagaaatcctctgactaccctatgccaagggttcccaaatctggctggaatgaccagtggcactcattaaaaatgtttaagcttctgggcccctcttgaggtccagggtagagcctagacatctgtattttaaaattcatttatgtaattttaaatggatgaatatcttacatggttaaataagtgtgtgtgtgtgtgtgtgtgtgtgtgagacagagtctcactctgtcacccaggctggagtgcagtggcgcaatctcagctcactgcagcctccgcctcccagattcaagtgattctcctgcctcagcctcccgggtagctggaactacaggcgtgtgccactacacccagctaatttttgtattttttaaagtagacacagggtttcacaatgttggccaggctggtctggaactcctgacctcaagtgttctgcctgccttggcctcccaaagtgctgggattacaggcgtgagccactgcacccagcccatagttaaataatttttttaaagatataaaaagatgttctgttaaaagtctccttcccacctctgtctcccaattgctcagttcctactcacttatctccctcaggtagccagtgtcattggggcatgtgcctgtgtgtgtgtctgtgtgtgtgtgtctttgtgtgtgtcctgaaattctttttatgcaagcaaaaaaaaaactctactctcctccccttttaaaagactacatgacaataacatacttttttccactgcatagtattccattacatggaggaagcacctgtctccttttaatgggcatttatttggttccaggcttattgcagatcctgctgcagtgagtatctttgcaggcatgccattgcacacctgctggagtgtacctgttgcagtgagtatctttgcagccatgccattgcacacctgctggagtgtacctgctgcagtattggtggaggcatgccattgcacacctgctggagtgcatcctataatacattcctcaaagtagccttctgagtcaaagagcacacacatttataacttgaaaaaatgttgacaaattgcatcttttttttaacagctcctatgtgattttaacacattactcaatctgtgggaggggagaccatgccctggaccagtgctgcttagtcaacatttaactttttaaactgaaaatcacctggggagcttgttaaaatgcagattctgattctggagttctagggtgggcccaagaatctgtatttctagcaaactcccgggtgatgccaatactgctggtccatggaccgcactttgagtatcaagacactagaggacacatactgagcataattcccaggtgtcagctgctatgccatgaaggcaattagacttagcatgcccaggacctaaattccagtcccgggacagcagttcgccagctgaggggccttgctggccaaatccctacattttctgagcctcagtcgcctcatctgtaaaacaggtgcagtaaagataagtatgtaaggattaaataacatcggtacatctcaaaaccaatgtgctgagcaaaagaagccagacaatagagtacatcccgtaagattctatttttgtggaactgtagaataggcaaagtcaatctatggtgatagaaatcagaatgggtgcctccggtctggggcaaaggggactgactgggaaaggggaggagggaactttcaggggtagtggaaatatctcacttgttttcgtggtaacacgggtatatacatttgtcaaaactcactgaactatgcacttcaaatctgtgcattttataacatgtaagttataccaaaatttaaaaatagatgaaaagtaaatgatacaacttcgtgtaaactgtgacgtgccatcaaaacagaagccagtcttagcttaaggaaatgtgccacctgcgtgcagggatgaggtcatcgatcgacaggggaccagagacggcgctccacccctgcatggtagcagcgtgctcccagccccgcgccgccgggacggcccacgccctgcctcggtttcccccgatggccgccgcttacttgcttcggaactcgtcgagcgcgcgctgcgcctcggtgccctggcgctccagccgggcgcgctcggcctccaggtcccggacgcgctggcggttgctctcgacttggcgggcgagggcgtcctcgggcccggccagctcgcccaggcgctggaaggcatccagctgcctccggagcccggcatggcgctgctcgagggcgcgggcccgctggacgtgggcggccacgcgctcgccgagcccctgcagcgccgccaggctcgttgccccagcccagccctcgtcggccgggcgctcgggctcggcggcgcgcgaagcctcgtcggcgtgctcgtactgctccttgcgggtctggaagacgtagctgcgccggtacatggctgctctggcgcgggcgcgcgggcggcgccgagccggctctccaggaggcccccggcgcagcccgcagcccgctaaataaacaccggaggcccccggcgcgctgctgggacgttccagagccgatcagcagttgggcgccacgctgggcccgggcgcgggagaagaaaagagcagcggcccgctttgtgcggcggattagcggcccatacagctccggggttggaaggttacgctgggcaatgaggtttttgttccgtgattgttcaggcctgttgcttttgattgaatggagggtcaggggacacgggagccatgacgctcttttcactggttccactggggactgtgaaggaatccccaagcgaactctttaaacttggactagctcaagagcccagggcttgtcactttgtctcctcttgcattcaaactcaattgtagaactctttaacaatgccattttttttttctgattacttaagcaattcttttttttttcttttggtcttttttatttccaattgctcggttatgcatgcaattctttttcataatcataacatgacgtttaggacccttctgtatagcagaggttcttaaccatggatgcaaaataaaatggcatgtctccattaagtagtgaggtgtggcgcaagtaatttcttagtaatacccgtgcataaaagcctacaataacttaggagacatgcacggttatgtttttataattcacccatgctctgatggagtttgacatgctttcttgaatggaaaaaacaaatagagccccacccatgggcctgtaataggtggttcacgcctgtaatcctagcactttgggaggccgaggcgggcggatcacctgagttcgaggccagcctggccaacatggtgaaactccgtctctactaaaaataccaaaattagccaggcgtggtggcgtgtgccagtaatcccagctacctgggaggctgaggcaggagaatcgctggaacctgggaggcggaggctgcagtgagccgagatcgccccactgcactccagcctgggtaacagagtgagactccgtctcaaaaaaaaaaaaaaaaagaaaaagaaaaaaagattgcttttttctttttctttttttaacataaaatgtaatacaaaaaaattttaataaaaaatgagatggggtcttgctatgttgcccaggcaggactcaaactcctgggctcaagtgatccgccattaattggccaaccctcaattcgagaataataaaggattttgtgccattatgttccattttaatttttattatggaactaatagttggattttaaggacaagcttttaaaatatatatatataattaatagctagactttgacaaatttaaaagtaaatttaagaaaagaaattaataccacttgatgagaatgtttctgaatgtaaatattttgtcatatctccaactttaaaaataagtatcaaaagggttgttttcttaaaaggattagtagtaccatataattactaactatatggattgtgtgtgattatactacaaattaaagtcatagttatcaaagatagagaaagaaaattacacagatctttgtggagtttattattacaccaaaatattacctcaagataatagattccgtctggaataaagctctgcaaggccctaaactgtgctggtggcatggttattgttctattttcttaaaccatttaaaattagatttggccaggtgcagtggaccacacctctaatccagaactttgggaggccaaagtgggaggatctcttgaggccaggagttcaagacgagccttggcaacatagtgagacccccatttcttttatttataaaaataaaaataataaataaaaatacataaaatgtaattgtatggtcaaattgaggataaccacatgaatatttttgtaggtgcacatataccatgctgatagcatggtaaattgacttcaggcttcctcacgagagcaaaaccaacatatagcaagagttataaaatcatttgttccctatgataccatgtatcagtcaaatattgctacagaacaaaatagaagtatttatcactgcattccctggggctgggagctcagctgtcttccagctgtaggtctcctttcagcaggggctgctctgctcccaatgtccctcaagcttctaaactagcaatgaaaaaagcacaagagcaagcccagccacacaagctcatcccaggcctttgtttgcatcatgtctgctgacatctcattggtcaaagcaaatcacatggccacaaataaagtcaagaggaagcaaggaggaggcagggctcagcctgaggccctggcaagggtgtgggtggataatcccatcatgctggagtggagaatcaggacccacaactcaatcgaccacacatggcaataccatttgagaaaaatatattctagaaacataacaaaaaattctttcaatttaatccagtgaaataaacactcagaaaatatctcctcacaaagcgtagcctcagagttaaatattgcacaaaatcaagtctctgccctcagggtgcaggaggcgaatccatactgactaatgaaaacacaagataatctggacaacttctaaaataaagatcttagcaaaatgctgtggttgtattgtctaacttcaggtgcactgggaaatgcaatcctgctatgtgcttagaaggagtgtgcaatatttgtcaacagccctaaagaccatatcactgataggagaccattcagtaggagtagagatcgtatgcataaggaagaaatcattgctgaatgaatttgttaattcaagagacatgttcgtagagatagattccacaggacttgatgaaaggtcagctatggaagagttactctaaatacagttgaatggcactagtttgggggcagggacaggaaatggatgttttagaataagaaagatctgaggttaagttctggtcccatcacttcagtaagtgatttaacctatctagtcccagtatggagactggtaaaatgagaataatcacttatgtaagtagggtaaccacacatcccagtttgcctaagacacatttacacccactatctcagcgtaaatatagcaagcaccatctttcactctcaagggtatcttggtttgtctgagaaatacacgtcttttatctggcctgcataacctgaatatgtagcctatatctgaccataaggaatcatccagataaatcccaaagaaggaacatcctattaataaaaacagaagggggatggtattctataaaaatgttaatatcataaaagacaaagagaagctatgaaaatgttccagattaaaggagactgaagagacaggacatctaaatgcagtatagggccgagtgtggtggctcatgcctgtaatcctagcactttggaggctgaggtgggtggatcatctgaggtcaggagttcgagaccagcctggccaacatggtgaaaccccatctctactaataatacaaaaaattagccggacgtcgtggcttgtgcctgtagtcccagctactcgggaggctgagacatgagaattccttgaatccggaggggtagaggttgcagtgagccaatatcacgccactgcactccaacctaggtgacagagtgagactccatctcaaaaataaaaataaataaataaatgcaatatggatcctagactggatcttgtattggaggagaaaaactgctataaaggttatcactaggttcattaacaaaattagaatataaatagtagattagaacataaaattgtatcaagattaaatttactgaagtttatgactatgctacagctatgtaaaataatatcattattcttagaaaatacactctgagggctcaggctgggcacggtggctcacgcctgtaatcccagcactttgggagaccaaggtgggcggatcatgaggtcaggagttcaagaccatcctagccaacatggtgaaaccccatctgtactaaaaatacaaaaaaattagcaaggcatggtgctacacacctgtagtcccagctacttgggaggctgaggcaggagaatcacttgaacccaggaggcagaggttgcagtgagtcgagataatgccaatgcactccagcctggcaacagagcgagacttcatctcaaaaaaaggaaaatatactctgaactatctaggagcaaagacccatgatgtatgcaacttattctcaaatgattctgaataaaatgacatgtataaatataaacataaataagtatgagagatagtaaggaaattagacaaaatattaagaggtgaatctgggttgtttgtactattcttgccatttttcctagaaagtttgaaattattttccaaaacacctgcaaaaagtgtgatcacctttgcagtatagacatttaataaatattacttgctttatgttatagctatatatatgtataatggctaagagagggagaggtgcagagaggagaatggcttagcaaactgcagtaacaataggagaaaatgggctataaccattgaacaattttacttatttattttatttatgtatttatttttttaaaaaaacagggtcttgctatgttacccacactggtctcgaactccctgccctcaagcaatcctcctgcctcagcctcccaaagtgctgggatcacaggtaagagttagcacacctggccccaccaaacaattttaaccttgtggaatatactatgatataaataaaaatgcttataacaaacttgaaggggaaaagaaaagcaaaataccagatgcatggtaattttagcagtacaaaaatatcagaaattagtgaaatatgccaggtttaatgttcatcatatcttttattccatttaaagttgtttaaggctgggtgaagtggctcatacctacaatcccagcactttgggaggccaaggcgggtggactgcttgagcccggaagttcaagaccagcctgggcaacatcgtgaaaccccatgtcgacaaaaaatataggcacatgcctgtagtctcagatactcaggaggctgaggtaggaggattgctggagcctgggaggcagagactgcagtgagctgagattgcaccactgcactccagtctaggtgatagaatgagaccctgtctcaaaaaataaataaaataaagttatttaaatgtaaaatacagtttcaaaattttttaattaacatttttcttcactaacaaatatctaaaagcctgagtaaaataggcttagatgttttgccttttagtcaatttcatactctagcattttgagccatccctttcagttgagatacattctgagtttgctttggacattttacagaaacaaaaggtaatggaggtaatcatatattccttagaggtgggtttcacgttaggtctctgctgcctactattgtgtgaccttgaacaggtcaatctgttttctacaatgatggacttaagctaaagaatatctaaggttcctttctgcttattatgagcagaattgtattcctccaaatctcacatgttgaagtcctaactccctcaaaatgtggctgccttcagagatggggcctgtaaagaggtaattgaggctgttagggtggacccgtctgtggtgctttgttctggaagccctagcaaacgaatacactgctctaacactctgactctgcaccttttaccatccgtcctttacccagaacatgcaaatgtctgccacaagagggccaccctatactaaaattgaatgccctgccacatggtcccaccagggtgcagcttgaagcctttccaccaaactggaccaactcaaaaggtaagtcagccatggaaagtgacagcccaggagtaaaagggcaggcagacccctggctcccggatccctactatccctgctccctgtagccaggcctctccatgaggccccagtctctaaagacgcacccgtgaagtatgctcagtgctcctggaagtgatgagtctgtaggaagggtcacagcagatggagaaacacactcagaagcaaggctctctctccaactaactgcacacacgcagttgactctgaagagttgctggaaaatgaagcctgagattcaaacactatcaaagagagcactaagcatccaacctgcttttctcagggtctaattcagaaactgaagcaccaaaaaaaaaaaaaaaaaaaaacaaatttgtgtgacagcaagtgtgtgcctggtgctttgactgacaggcaccgacaaaaggcaggattaccaaatgtaatgcaggatcctaaactggaccctagactgcaaaaataaaatctataagggacattgtgatgacaattgatgaaatttgaatatggaatgaggattgataaaaatattgtaacagagttaaaatgtctaattttaaacattgtattacgacatgtaagaaaatgaccttggctgggtgctgtggctcacccctgtaatcccagcactttgggaggtcgaggcaggagggttacttgagcccaggaatccaagaccagcctgggcaatataatgagaccctgtctctacccccaaaaatacaaaaattggccgggcatggtggcacatgtctgtagttccagctacttgggaggctgagatgagaggatcacttgagcctgggaggcagaggttgccgtgagccaagactgtgccactgcactccagcctgggtgacagaaggacactgtgtctcaaaagaaaaaaaaaagaaagagagaaaggaaaggaaaggaaaggaggaaggaagaaagggaagggaaggaaggaaagaaaatgacctcgttcataggaaactggtttggggatgaggcatgatgtccaacttactctcaatggttcaaaaaataaataatagatatgcatttatgttgatataaacatatataaataaatacataaaataataaagcaaatgattggtggatttaggtaagaggtatagaagttccttttactcctcctgcaacttttccataagtttgaaattgtaacaaaagaaaaagttacctctcaaaatcccaacacctccaggaaaattgtgctgagaacaggtgtttcttaatgatagcaagaaaacgcaaaaatcttcctttgattcaccagatggtatcatgatctcagcaaccaggatttcattgacaaccacggtaggagttttacacctaccgaaatgatggtacggattttcagagacatctggacttgccttctctgcacagtctcagaatgtccttgagacattgtcgtaccaactcatcgtcattctggttatgcatgaaaagcagcccttcccatgacctcagaaatgcagaaatgagtcattgtcccagcaggtgccatcctcaggactgcgtttggagaagtgtcttttacagttataatttctgtggctataaatctagccatggtattcatatttctgccctatatttctctctaagatatcattaaacaaacctaccaccactttcaagttgggtcagcctacatctgaaccacagcccgtttccttctgggaatacactgtcaagtggtttgatatattaccaagccacagttgtccaactggcatgcccactctgtcctaaaaagaaggatgttccagccctgctttgtatcagttaggagatagatcccaaggaattgggcacatgcatccatgaatatatttcttcttcttttttttttttttttttttttttttgcaatggggtcttgctcagcccaggctgaagtgcagtggtacaatctcagctcactgcagcctcaacctcctgggctcaagcgactcacccacctcagctgccaaactagctgggactacaggtgcacactaccatgcccagctaatttttaaactgtttcatacacacaggagtcttgctgtgctgctcaggtggtctcgaattcctggcctcaagtgatcctcctgactcagcctccccaggtattgggattacacgtgtgagccaccatgcccagcccatgaatatatttctgatagaaatatacattcatatattcatagattgaacatacatttgggggctgggcatctggctctcgcccagcactttgggaggctgaggcaggtggattgattgagcacaggaatttgaaaccagcctgggcaacatggcaaaaccctgtcgctatatataaaaaataataataataatacaaaaaattagctgagcatggtggtgtgtacctctgtagtcctagctactcgggaggctgaggtgggaggatagactgagcctggcaggtcaaggctgcagtgagccatgattgtgtcgctgcactccagcatgggccacagagcaaaactctatctcaaaaaaaaagacaaaaattaaaaaaagaaacatacatttgggctgtccattgttttgtaggtccaggtctacttttctattaatatcagtagggactgattgaacacaagagaacatgttctatcttccaaagttcactagcttcccagcgttgacctgaaattgggggggacaacaatagtgcaagctattttatgaactattttcatattgtgcatacagtttaggagtatagtaaggtacagtttaggagtatactatacattttaagcccctcaacggcccctcagacctaaactccacatgaagttttctaatgaaattctaaaaatagtcagtttacagaagttcgccattgtttagcagggtctggccaaaattcaaagaatgacctattccaaccatctgacttgttagttcatttggtaaggagctacaagtgatgtgaatatttcctgctattccaccctctaccacctgcctgctcatgatcaactcctactgacttctatgccttcatttatttgaaatttatgtcatcaggctttacttctcacccagcatacatcatccttttctccatttgcctgtcaccctcagctttgacaccaatatcttccctactcctttacacctcccacccaacccctcatgtatattaatgtatgcaggaagatgtctaaagtggtcttcagttctacacacccacgcccccataccccaagacaccattccagttaaggtcccccgctgtttacctggcagacctgctgtatgagtatcttcactagactgcagctctttgagggcagggctgatagcaatgctgggcatccctcagtggccattgtccacctgaggatctccccaggtgcccaccctccatccttctccatgcctctctaaaacgctgaaagcctggccctcccagactgcatcacctccgggtgcctctcatgtcctctagcttcctgtagggtttggcaaatgggagtcactgtcaggagatcaaaaagactcccttcctgcttcccttctgctctggcataatctctcctccaagatcctttcctcctgctcctttaaagcctacaggtagtaatagtttcccactgttgctactacaccatgggcacttcaccatgctttgttgattcatttggctcgttagatactaggaacgctgggagctacaaaatctcattcagcaactagttaaagcttctgacacaaagtggatgcccaataaaatgaattaaagagtgagtgaatattagagccaggagctgtagcatgcacctgtaatcccagctacttgagaggctgaggcgggaggatcactggagaccgggagttcaaggctgcagtgagcaatgatcattcctgtgaatagccactgcaccccattctgggcaacatagtgagaccctgtctctaaaaaaaaaataataattagtgaatattagatagaaacttgaaataaaagataaagtttttgcatgttgggaggtttgtcatgaaactcttaaatgggaaagctgaatagtgcttggccaaagatggatcattacaagggatcttaccagcagttccaggccctctcattccacattcgctgattgggctgtttcaaggggcatggtcaaatttagtagcagtccaaaattgaaatttactttgctgtctgctatgatggctaggtttacattgtctgtcatcattagaggaaatatatagggacagaacaaaaatacatttattaagaaagagaacagtgcaccagtcagcagaaagactatagttataagacacatgaaaagaaaaagttaattccttggaaaagagctttctattttaagaagatgaacaaaataagagaggtccttaagtgatagctaatgaagacacttcccaggcatcctcaatggctgtggcttttcagatgtcaaccgaaaacaaaatccattacaaagcgtagcatccaagttggatatgggttgcttattttgttctgtggtcagcctttgctgaacatagcagtctaaaccagagccacagagctgtgagtggtccttgtctgtaaaatgcacttggactgtcctcggtgaccctaattgcatgacttggcaagaacaacaattaaataggatattttggaccaaattctctcagagtacattattttctcaaggtaacctgagttttggggtgacacacacagtgtaaccaaaagtgccactttgcgagggtttgctaactgatgtcctcgtaacctccaaaatcaatttcagggcattgcagagtcaacacatcaatgttcccctgcctgcatttggggcacttgctggctgagtcacctgcaggagtgttctggagttgcctcttagtagatcatgagagccaattgctaaattttcaggaattttgcaagctggttgacacctcatcggtagcttgaaattggaaacggtgagagtatctacaccacaagaatgataaacactacaaaggaagacatttctctcctagaaagtcagctgttggccaagcattgtggctcatgcctgtaatccctgcactttaggaggccgagataggaggactgcttgagcccaggaattcaagaccagcctaggcaacatacagagacctcatctctaccaaaaaaaaaaaaaaaaaaaaaattcaccaggtgtggtgccatgcacctgtagtctctgctactcaggaggctgaggtgggaggatcactagagcccaagaggtcagggctgcagtaagctatgatcgcaccattgcatgcctgctctggtgacaaagtgagaccccatcttaaaaagaaaaaaaaaagtcagttgttaaacatttactaacctcacattacctatgaataataccatatctctggtgatggaaattttggcattctttcctcagtctcattaagctcaaagagagtcttcctaagtgtattgtttaacatggaaccctaaatttaaatgctaagttttaaaaaattagactagaattagagtatatagcctgagaacatggtttgttttcatttctagttggctcaagatgtttctgaaaaataatttataataaattgccttataaagttaaaatgccttccaaaattttataagtcaatttcaaaaactagggaagtcagccagtaaataaagagagaaagagatttatctcaaaatagtttcagcaccgctagaggaatctgtctctgtttcagtggaaaaggaggcagttactcctagctaatctcaatattttctttcccctggaataatggctgaccactggctctgttgtttttggccaactcctctactgaaacaaaaattttgtaactgcagtgacctaacttgggaaacaattttataacattttctaggaaccacaaatcatttgtttcattctttctgaagaccaacagtggcggtaagcagagagtgtcttttgccgtgtaacaaagaaaaaacttgataaagtcagcagccagaagagcatttcagttcaaagaagggtcatccagagcccatgaaatgttgtctttcacattaggaatgaatatgcctcacacagcgtcatgaccgactaaaaccctggatcaatccaacttgttattagagcataaatggtgacctttatttatcacacaatgaattttaagctgggaagccagttttaagaaaaacagcagcaacagtgttagctgcaaaaacattttagaagagctaggagaaaataaaacattattgaacttcttcatgtggctagaaaaaaaaaaccttctggcatgtgactcagatttccattgggtgaatgcagactcatccaagttatgcaacattattactgttgataggttacaaaaaatctatcagctcatctatcagaaaaatccaccagcaaaatgccctcaaaagcttatgaaatatgtaccagtgaagatatgcgaagcaacttgatatgctgttgtaggacatgtggtcatgaaaactatgtccgcttaagttaaatagtctggatttaaatccttcatgacccattagctacatgacttacacaagacactgaacctctctaagcctcacatgcttcatgtataaactggacgtgatagaagttcccaaaagagttgttgtgagacttaaatgttgtctggcatatggtaagtgcttaacaaatatctgcctttattttttgcacatggtctatgtttattttaagcatccgtcttagcttgaagtcccccagaagccaactccgtggcaaggatttgagtacaagtaatgtattttggacatgatcccaggacaccagtagaagagtggggaagtgagatggggaagggaaagtagccaatgatggcagggtgaccaccatcaccatgggggcaactggatctcaacatatctaagggttctaggagacagagtagaatgcatcacagagatatcccaggcaagggacgcgaagctgggtacttatccaccaatcccctatccatcattggttgagggctgctccctacacagccccaactcccaattgtgcagcacttgtgggacagaaagtggcagatggtttagagtaagcaggctttagcacatagaggtgagtgctgagggggtacgggggtgcagcacagccactgctacagccccacattattgttttcaggtaatcaaattagctgaagtacctctacatagttattttaatagatcagctctctagagataataatgtaacaaaacaaaagagctgtgtctatgctggttttaatggcagtactaagacaagaaataaattacctaacttaaaaaaatcagtatgagagttcccattaaatcaacacagagttgggaataatatatggagttaaaaccataattctgttttgaacctcttaccacctcctgaatatccatcacctaaaattacagatgtatctgttatttttcacagtgctgtggaatagccaagacatcatgaaaacgtaaaacatccctctttttccaaaaatcatcaagcttttagcagctgtaataataggcttccccagtaactgaaaccaatcaagtttttaggacaaataacattttaagactttcccatgcatccagacaaaggttcaaacactaaaatgatcattaacacctacaaactgcattcccaagctgagaaatgtatctgttacataatctgatcatttgtgttcttgtcatgtgaaaaggggaaagtcaatattttactaacctctcattcttgggctctcaatgcaatagaaattgacatgaggacaaaagagttttcccaggcgaggcttcaatggagcttatgcccaggcaaaagggaggtagcacaagagaaaaagagaattgcctgactgactttccaaaaagagcaggtagggcttttttttattaggcaaagcatgagcattgacactgggggtagggtttgcgggctgggctggacgaagcacaggagaggtagggtatgcaggtggcataactggttgtgatggttatcttgagtaatgggccatctgatggtctggccagcatcaacaaggctgtaaattaattgttcagcattccttccttggtttgatatttagatttcctaaggccagttcctggaattctttaagtaaaaggcatggttaaacattatgaaggagggggccgggcacggtggcttatgcctgtaatcccaacactttgaaaggccaaggtgttagagaagcaggagcctaagacagccagagtgaaaacattttaaaatcaactccatcttaaaactagtgaggcacactcttttccagtcacaacccatggtcctaaggtgtttacaacctaggaggcagcttggtaatgcctgcaagggcaaactcctacaacaacagaaaacctagatgtcccaataccaataacaagatatgctttcaagatcattatacttatgctttgatgtacttgcacactaaaatgccaaagatagttttctttaaatcaacagaataatacattttgtcatgctgtcggcccacctgcacattggcacagcttagtttagtctttacatagacaagaccccatatgagaaaaacttgaaacaaaaatggtgtgttcctcctcttgctttctgaaaatgtgctactctgtgacagagtagcttccaataaactatctcgtctttcatcacactttaccacttaccttgaattctttcctgtgcgagatccaagaatctcctcctggggtctggatcaagaccactgtattagtccattttcgcactgctataaagaacttcccaaggctgggtaatttataaaggaaagaggcttaattgatttacagcttcgagtggctggggaggcatcagaaaacttacaatcatggcagaaggggaagcaggcatgtcttacattgtgacaggtgagagagagggagagcacgtgagactgcaagaagaactaccatttataaaaccatcaaatctgatgagaattcactcactatcatgagaacagcatggagaaaccgccgccataatccaatcacgtggggattactcgtcctctctcaacatgtggaaattacaattaaagataagatttggggctgggcgaagtggctcatgcctgtaatcccagcactttgtgaggccaaggcaggtggatcacctgaagacaggagtttgagaccagcctggaccaacatgttgaaaccccgtttctactaaaaatataaaaattagctgggtgtggtggtgcacacctgtagtccccactacttgggaggctgaggcaggaggatcccttgaacccgggaggtggaggttgctgtgagccaagatcacaccacactgcattccagcctgggcaacagagtgagactccatttaaaaaacaaaaaaaacaaagaagaaagcagctctttgtttcagctaggagcggtggcttacgcctgtaatcccaatactttgggaggccgaggtaggtggatctcgaggtcaggagttcgagaccagcctggccaacatggtgaaaccctgtctctactaaaaatacaaaaattagccgggtgtggtggcaggtacctgtaatcccagctacttgggaggctgaggcaggagaattgcttgaacctgggaggcagaggttgcagtgagctgagatcatgccactgctgcactccagcctgtgtgacagagcaagactccatctcaaaaaaaaaaaaaaaaaaaaagatttgggtggggacacagagccaaacaatgtcaactcctttttccagtaacagaggcaggagtattccttgagtccgggagtttgagactagtcagggcaacatggtaagactttgtctctgtaaaaaattaaatataattaaggaaaaaatagtaaaataaataaataaatatatatatgagggaggaagtctgtcccattcctattgtacctcaattcccccagagagatttcatccttcttattcttaaggagacagggccaaagatctcatcttccgaagctgcttcctgctgaacagggttgtcatccttgcctaattttgagggcactgaaatctctcgcttactgttttaaagacctgtaaaaactgggctcctcctgggatggtgtggattggaatatttgggccattattagcttgattcagaactgttgaagcctggaagacataaactttaaccatctgtacccctgttgaatataacaaataatcattttaaaaatcaaatagcacccaatgataattaataaaatgcttaagcccagtttaacaatgtttgtaaaaagaaattggatggcatttggaatctaagtgaattggttggaaaaccagcctcctgctgtctaaaacataaagcaagtggatttttaataagagacatgttttttttctttttctttctttttttttttttttgaaacaaggtctcattctgttgccaggctggagtgcagtggtgcaatctcagctcactgcaacctctgcctcacaggctcaatcaattcttctgcctcagcctctcaagtagctgagattacaggcttatgccaccatgcccggccaattttttttttttttttttttttgtatttttagtagagacaggggtttcaccatcttggccaggttggtctcaaactcctgacctcaggggatctgcctgcctcagcctccgacagtgctgggattacagttgtgagccactgcacccagccaatagaggcatttttatggaaacgggggaaaaacaaatattaatagtgggcataatctatccagagaatgttagtttggagttgtagcctggaaagaatttaagatctagtccaaattgcagaaaataatgcaaaaaaaaaaaaaaaaaaagaaaaaccctcaaaaacgacagacaaggctagaatctaatagcatgtgtatgataatgtttttctctctagtctctcatttttattaaaaacaaattatggtacgatcaatttatttacaaaataagttttagtcttactattcttggcctgatgatttgcataaagtttaccaataataattatttgccttacaggctctcttaaactggctttgctgaaactttttacataagaaatctcagattcagacttgttaaagcctcaagcccagccacaaatttatctgttcctgcaaatacctgtatgaattgggtgaattcctctcctctggaggtcccaagataacttggggttcttgggccattagaaagtgacattcttttctcaccaggtacagagactgcatagaccgagtatgatgccagtcttctccaaggggcttttatcagttcttggagtcaacctcaatttttaaaaaatcagtctaaaagcataacatttcagtcaaagccttggtaaaataaccagtctccaactgtgtatttttacaaaagaaaacagattcttatacttattgttttttggtggtggtagttttgtttgtttgtttgtttgtttgttttttagatgaggtcttgctctgtcacccaggctggagtgcagtggtgtgatcatagctcactatagcctcaaactcctgggctcaaggggtcctcctgcccttgcctcccaaatagctgggactacaagcacatgccaccacatcaggctagtttttaaattattttttgtagagatagagtctcactatgttgcccaggctggtctcaaactctttgtctcaagtgattcccctgccttggcctcccaaactgttgggattataggtgtgagccactatgccagccccatatttcccttttgcagcacttgatcttggctgcatgaatccagttgcttctgtgttttgccatgtttgttattccttctcagcctctagaacgaatcctcttaaatatcacatctttgaattactggggttcctggttgtattagtctgtactcgcactgctataaagaaataccaagactgagtaatctataaagaaaagaggtttaattgactcatggttccttaggctgtacaagaagcatggcaggttctgcttctggggaagcctcaggaaactcacaatcatggcagaaggaaagcaggggcaagcacgttttacatcaccagagcaggagcaagagagagagtggggaggtgcttcacactttgaaacaagcagatctcatgagaactctatcacgagaacagcaccaaagggatggtgccaaaccattcacagtccaggcacagtaggctcatgcctgtaatcccagcactttgggaggccaaggagggtgaatcacttgaggtcgggagttcgagaccagcctgggaaacatggtgaaaccccgtctgtactaaaaatacaaaaactagcctggcgtggtggcacacacctgtaatcccagctactcaggaggctgaggcacaagaatcacttaaacccggggggcagaagttgcagtaagccaagatcgtgccactacactccagcctgggaaacagggcaagaccctgtctcaaaaataaataaattaattaaataaaaagtaaaccactcataaaggatctacccttatgatccaatcacctctcactaggtcccatctgcaacactggggattacaattagacatgaaatttgggtggggacatagatccaaaccatatcactaggagatctgtcccaagcccacttctctatttaccctcagaatagttctcaacctttccaggccatgaggtagtaccactcgggattgctttcagatgcacacaacaggcttacccacatcaggattatttttctctaattgttgccaggaaagggatcctgacccagacaccaagagggggttcttggactttgtgcaggaaagaagtcaaggcaagtcacagagaacagtgagaagagaaagcttattaaaagccacttagttacagagtagggtgtcctcagaaagcaagaggagaaatgtctcatctttgttttaaatttttcttatatagggtcttacctatataaaagttaagctatatctacctgttggggggctgacagtgtcacaagatttattagtttgttgatttaaagaaaactgttcttggcattttagtgcataagtacatcaaagcatgactataatcctttttttttttttttttttgagacggagtttcactcttatctcccaggctggagggcaatggcgtgatctcagctcactgcaacctctgccacccaggttcaagctattctcctgccttagcctcctgagtagatggaattacaggtgcccatctgcccaccaccacacccggctaatttttgtatttttagtagagatggggtttcaccatgttggccaggctggtcttaaactcctgacctcaggtgatccacccgcctcggcctcccaaagtgctgggattacaggcgtgagccaccgtacctggccaactacaatcattttaaaagcatgtattattatgcaataccaggacatctggacatttttttctgtcatagtttatccttgcaggcattgttaagctgtttcctcagctgtaaacatcatataaccacaggtcatgatagacaagaaatgtgccttgccagttttacgatggagttgattttaaaatggtgccactctggctctcctatgctcctgcttccctaacatgatgacatgcagtccagaggtaggcagttcagggcgagtgtggtggagccttcagtcccaggttcattccaactcttcactctgctggctttagtatgtggcttagtgcctgtattaggccatacttgcattgctataaataccttagactgggtaatttataaagaaaagaagtttagttggctcacggttctgcaggctgtacaggaagcatggcaccagcatctgctcggcttctgaggaggcctcagggagtttttactcatggtagaaggcaaagggggagctgtctggtcacacagtgagagtgggaggaaggcagagaggtgccacacacttttaaatgaccagatctctcaagagttcactcactgtcacaaagacagcaccagggagaaggcgctaagccgtttatgagtgatccacacccacgatccaatcacctcccaccaggcccctcttctaacattggggattacaattcaacttgaaatttagaggtgacaacatccaaactatatcagtgctcaagctcacagatggctgctacccttaggtatcacatctgtacctgaaatcacttgtacatctacaccaccaatcttattcatgtatttattcaacaaatatgtattgacaacctaccctgtgccaacactcttctgggccttgggatacagaagtgaaaaaaataaaataaggctgggtgtgacggctcacacctgtaatcccagcactttgagaggcagaggcgggtggatcacctgaggtcaggagttcaagaccagcctgaccaacatggtgaaacctcgtctctactaaaaatacaaaaacattagctgggcatggtggcgggcacctgtaatcccagctattcaggaggctgaggcaggagaattgtttgaacccaggaggcagaggttgcagtgagccgagatcacaccattgcactccagcctaggcgacaacagcaagactctctctcaaaaagaaaaaaaaagaagaaaataaaaatccctgatccctgttcttgtggagcttatattcaattggagaaaacagaaagtaaataagataaataagtgaaaaatagagtataataagtggtgataagtgttacagagaaaaataaagaaaagggaactgggaggatggtggggcatctggtaattttagacagggtggtcagagaagacctcactgaggaggttacatctgagtagagaacggaaggaagtgatgggaaagccatttggattcttgaagaaagagcgttctaaacatggggaagaataaatataataggatgtgcctggtttgttcaaggaagggtgcagaggccatcatggcaagagtggggcaggtgaggatagagtgcgggtcagatgaggtcaggaagggcaacgagaggacagatcccacgggatttctacaaatcctccataaggatttggcttcactgtgagagtaaagggaagcctttgataattttggcaaggaagtggcataaactgacctacaacttaacagcatggctttcatggctgtgctgagaatagcagaagcagagagaccagccaagagaccattgcagtaatccagtttagaggtgatggtgagttagaccagggtgatagcaatggaggtaatgaggagtgatagaattctatatatattttgagggtagaaccaacagaatgtactgatgtgggatgtgaaagagaagagacaaggataaaatctgaagctggaaggatgaaattgacatttacaagatggggaagactggaagtgaagcagatttgggggaaaaatatcaagatttctgttttaattatgagaagttgagatgtctatgaaacatccaagggcaagtgttgaatagacagttgcatctacaagtcagaaatctggagagaggtcaaggacagacataaatttgggaaccaacagcagagagaagatatttaaagtcatgaaactgaatcagaaaactaagggaattagtgcagagagtaaagagaagaagtctaagaacttagtatgcatggggactctggagatcagcggttaggagatgaagaggaaccagcaaaggagcctgaaaaggaccagataggtaggtggaaaatcaggaagagtgtgtgggattccggaagccaagtaagtaaagtgtttcaaagtgaagagaagatatgactgactatgttgtatgagatgaggactaagaattggccattggatttagcaatgtgacgttccatggtcatatgagtaaaagcagtttcaggaaagtggtggggaagaaactatgaggatgaaatgccaaactcaacaagaacaactaaaatccatggaataaaattcacagggtagacaaaaaaacaaaaacaaaaatcctcaatgaaagaacaattacttcaatcaacaacttcaacaaatatttagtgtttatcatctatgtgccaagtgacattcgaaaaattcattggcaattcagtgatgaagaaaacaaagtacctatacttatggagcagatattctattagggttaaagagacagtaaacaactaaacaaatatacagtgtgtcagttgctgataagtgcttcaaaaatcatacagaacagaaagaggatagacagtggaggcaagtggggtggcaaactactttagataaggtgatcatcaaggcctttcggatttattagtagagagctcatcttataccagttagaattgggatc

SEQ ID NO: 110 - DNA, 2223 bp, human
ggaattctttatttgcaccctccctccgagtcccctgctccgccagcctgcgcgcctcctagcaccacttttcactcccaaagaaggatgaagggtggttgtgtctcccagtggaaggcggccgccgggttcctcttctgtgtcatggtttttgcatctgctgagcgaccggtcttcacgaatcattttcttgtggagttgcataaagggggagaggacaaagctcgccaagttgcagcagaacacggctttggagtccgaaagcttccctttgctgaaggtctgtaccacttttatcacaatggccttgcaaaggccaagagaagacgcagcctacaccacaagcagcagctggagagagaccccagggtaaagatggctttgcagcaggaaggatttgaccgaaaaaagcgaggttacagagacatcaatgagatcgacatcaacatgaacgatcctctttttacaaagcagtggtatctgatcaatactgggcaagctgatggcactcctggccttgatttgaatgtggctgaagcctgggagctgggatacacagggaaaggtgttaccattggaattatggatgatgggattgactatctccacccggacctggcctccaactataatgccgaagcaagttacgacttcagcagcaacgacccctatccttaccctcggtacacagatgactggtttaacagccacgggacccgatgtgcaggagaagtttctgctgccgccaacaacaatatctgtggagttggagtagcatacaactccaaggttgcaggcatccggatgctggaccagccattcatgacagacatcatcgaggcctcctccatcagtcatatgccacagctgattgacatctacagcgccagctggggccccacagacaacggcaagacagtggatgggccccgggacgtcacgctgcaggccatggccgatggcgtgaacaagggccgcggcggcaaaggcagcatctacgtgtgggcctccggggacggcggcagctatgacgactgcaactgcgacggctacgcctccagcatgtggaccatctccatcaactcagccatcaacgacggcaggactgccctgtacgacgagagctgctcttccaccttggcttccaccttcagcaacgggaggaaaaggaaccccgaggccggtgtggcaaccacagatttgtacggcaactgcactctgaggcattctgggacatctgcagctgcccccgaggcagctggtgtgtttgcactggctctggaggctaacctgggtctgacctggcgggacatgcagcatctgactgtgctcacctccaaacggaaccagcttcacgacgaggtccatcagtggcggcgcaatggggtcggcctggaatttaatcacctctttggctacggggtccttgatgcaggtgccatggtgaaaatggctaaagactggaaaaccgtgcctgagagattccactgtgtgggaggctccgtgcaggaccctgagaaaataccatccactggcaagttggtgctgacactcacaaccgacgcctgtgaggggaaggaaaattttgtccgctacctggagcatgtccaggctgtcatcacggtcaacgcaaccagaagaggagacctgaacatcaacatgacttcccctatgggcaccaagtccattttgctgagccggcgtccaagggatgacgactccaaggtgggctttgacaagtggcctttcatgaccactcacacgtggggggaagacgcccgaggcacctggaccctggagctgggatttgtcggcagcgccccgcagaagggggtgctgaaggagtggaccctgatgctgcatggcactcagagtgccccgtacatcgaccaggtggtgcgggattaccagtccaagttggccatgtccaagaaagaggagctggaggaagagctggacgaagccgtggagagaagcctgaaaagcatccttaacaagaactagcgctgcacatccgcctttcccaccgccctccctccccagctccgcctctgtcctcgctccacgtttcaggcaggcacctagcaattccatcacccgtacaggcaattccgtcttcttaatctgaagcttcactcactgtcaatgattattttcattacaatggaaacaatcttttttactctatgccccaaatatagcgttcccaacaacccggaattc

SEQ ID NO: 111 - DNA, 1356 bp, human
gtatatataacgtgatgagcgtacgggtgcggagacgcaccggagcgctcgcccagccgccgyctccaagcccctgaggtttccggggaccacaatgaacaagttgctgtgctgcgcgctcgtgtttctggacatctccattaagtggaccacccaggaaacgtttcctccaaagtaccttcattatgacgaagaaacctctcatcagctgttgtgtgacaaatgtcctcctggtacctacctaaaacaacactgtacagcaaagtggaagaccgtgtgcgccccttgccctgaccactactacacagacagctggcacaccagtgacgagtgtctatactgcagccccgtgtgcaaggagctgcagtacgtcaagcaggagtgcaatcgcacccacaaccgcgtgtgcgaatgcaaggaagggcgctaccttgagatagagttctgcttgaaacataggagctgccctcctggatttggagtggtgcaagctggaaccccagagcgaaatacagtttgcaaaagatgtccagatgggttcttctcaaatgagacgtcatctaaagcaccctgtagaaaacacacaaattgcagtgtctttggtctcctgctaactcagaaaggaaatgcaacacacgacaacatatgttccggaaacagtgaatcaactcaaaaatgtggaatagatgttaccctgtgtgaggaggcattcttcaggtttgctgttcctacaaagtttacgcctaactggcttagtgtcttggtagacaatttgcctggcaccaaagtaaacgcagagagtgtagagaggataaaacggcaacacagctcacaagaacagactttccagctgctgaagttatggaaacatcaaaacaaagcccaagatatagtcaagaagatcatccaagatattgacctctgtgaaaacagcgtgcagcggcacattggacatgctaacctcaccttcgagcagcttcgtagcttgatggaaagcttaccgggaaagaaagtgggagcagaagacattgaaaaaacaataaaggcatgcaaacccagtgaccagatcctgaagctgctcagtttgtggcgaataaaaaatggcgaccaagacaccttgaagggcctaatgcacgcactaaagcactcaaagacgtaccactttcccaaaactgtcactcagagtctaaagaagaccatcaggttccttcacagcttcacaatgtacaaattgtatcagaagttatttttagaaatgataggtaaccaggtccaatcagtaaaaataagctgcttataactggaaatggccattgagctgtttcctcacaattggcgagatcccatggatgataa

SEQ ID NO: 112 - DNA, 1783 bp, human
tcgagcccgctttccagggaccctacctgagggcccacaggtgaggcagcctggcctagcaggccccacgccaccgcctctgcctccaggccgcccgctgctgcggggccaccatgctcctgcccaggcctggagactgacccgaccccggcactacctcgaggctccgcccccacctgctggaccccagggtcccaccctggcccaggaggtcagccagggaatcattaacaagaggcagtgacatggcgcagaaggagggtggccggactgtgccatgctgctccagacccaaggtggcagctctcactgcggggaccctgctacttctgacagccatcggggcggcatcctgggccattgtggctgttctcctcaggagtgaccaggagccgctgtacccagtgcaggtcagctctgcggacgctcggctcatggtctttgacaagacggaagggacgtggcggctgctgtgctcctcgcgctccaacgccagggtagccggactcagctgcgaggagatgggcttcctcagggcactgacccactccgagctggacgtgcgaacggcgggcgccaatggcacgtcgggcttcttctgtgtggacgaggggaggctgccccacacccagaggctgctggaggtcatctccgtgtgtgattgccccagaggccgtttcttggccgccatctgccaagactgtggccgcaggaagctgcccgtggaccgcatcgtgggaggccgggacaccagcttgggccggtggccgtggcaagtcagccttcgctatgatggagcacacctctgtgggggatccctgctctccggggactgggtgctgacagccgcccactgcttcccggagcggaaccgggtcctgtcccgatggcgagtgtttgccggtgccgtggcccaggcctctccccacggtctgcagctgggggtgcaggctgtggtctaccacgggggctatcttccctttcgggaccccaacagcgaggagaacagcaacgatattgccctggtccacctctccagtcccctgcccctcacagaatacatccagcctgtgtgcctcccagctgccggccaggccctggtggatggcaagatctgtaccgtgacgggctggggcaacacgcagtactatggccaacaggccggggtactccaggaggctcgagtccccataatcagcaatgatgtctgcaatggcgctgacttctatggaaaccagatcaagcccaagatgttctgtgctggctaccccgagggtggcattgatgcctgccagggcgacagcggtggtccctttgtgtgtgaggacagcatctctcggacgccacgttggcggctgtgtggcattgtgagttggggcactggctgtgccctggcccagaagccaggcgtctacaccaaagtcagtgacttccgggagtggatcttccaggccataaagactcactccgaagccagcggcatggtgacccagctctgaccggtggcttctcgctgcgcagcctccagggcccgaggtgatcccggtggtgggatccacgctgggccgaggatgggacgtttttcttcttgggcccggtccacaggtccaaggacaccctccctccagggtcctctcttccacagtggcgggcccactcagccccgagaccacccaacctcaccctcctgacccccatgtaaatattgttctgctgtctgggactcctgtctaggtgcccctgatgatgggatgctctttaaataataaagatggttttgatt

SEQ ID NO: 113 - DNA, 6502 bp, human
  misc_feature (4737)..(4737): n is a, c, g, or t
  misc_feature (6081)..(6081): n is a, c, g, or t
cgctgcaaatgccagggcagtgaagccgaacagaaaaccccatcgctttaaaaaggcagctgtccgccctccccctttcccctcgccaggcgaggcccctcaagtccgggatccgcgagctgcgcggaggatctcgccaaacccgagcaccgtgcggcgtcttttaagagctcgaacaacgggaatccagcaaaaaacaagccggccccagaaggcagcctccctcctctctccgcgcacgggctacaatcgcccccagtccccaaactgtcccagtagaggccgcgcggagagagcagagccgagggacccagcgcaaggcgggagccaagcgcggctgctttaagaacgcggagagcgcgcgcccgccgccagctggcccgggctgcgcgcccccgccgccaccgcgcgccccctgttcgctcgctccttcgctcgccggctttaaagtctctgccaggatccatgctcacatgttacttcctgtatggaggcatggccagtttccagcgccgcgctcttcgttccttcccagcctgcgccggagccacaactttcaggagcatggactgaaggcgccctcgccccagcgcccctctgagatcctttgtgttttcctccgtttcctccggccgtttctattttggggggctctccgctccccctgcctctcccctccccttcccctctcgcaaacatgcctccttccttcccggggccctggaaggagctgcctgcctgaagcccggagacgccgcgccgcgctcagccccgccgccgcccgccggctctcgggctgtgctgcgctgccgactcaagttggggatcctcggctgctcgccgccgccgcccgcggtccctgtctgccccaggcccggggcatcgccgccggccgccgactccgcgccctgcccgatcggctctctcctttttaaacggaaagcagcctttctccgccgagaggatcgtccccagcgtggctctgcgttcccggtcactttttgagattttccggggggcgctcggcggcttcccggattccaaggggactcgggccgccgagcgcggggggcccgtggagcgggcgagccggggaagcgccccggcttagcggaggctcgcacggaggcaagaacttattcaacaagtttacctccctgctttcctcttttcgatgtgcgttttcggacatgcggaggttactggaaccgtgttggtggattttgttcctgaaaatcaccagttccgtgctccattatgtcgtgtgcttccccgcgttgacagaaggctacgttggggccctgcacgagaatagacacggcagcgcagtgcagatccgcaggcgcaaggcttcaggcgacccgtactgggcctactctggtgcctatggtcctgagcactgggtcacgtctagtgtcagctgtgggggccgtcaccagtctcctattgacattttagaccagcatgcgcgtgttggggaagaataccaggaactgcaactcgatggcttcgacaatgagtcttctaacaaaacctggatgaaaaacacagggaaaacagtcgccatccttctgaaagacgactattttgtcagtggagctggtctacctggcagattcaaagctgagaaggtggaatttcactggggccacagcaatggctcagcgggctctgaacacagcatcaatggcaggaggtttcctgttgagatgcagattttcttttacaatccagatgactttgacagctttcaaaccgcaatttctgagaacagaataatcggagccatggccatattttttcaagtcagtccgagggacaattctgcactggatcctattatccacgggttgaagggtgtcgtacatcatgagaaggagacctttctggatcctttcgtcctccgggacctcctgcctgcatccctgggcagctattatcggtacacaggttccttgaccacaccaccgtgtagcgaaatagtggagtggatagtcttccggagacccgtccccatctcttaccatcagcttgaggctttttattccatcttcaccacggagcagcaagaccatgtcaagtcggtggagtatctgagaaataactttcgaccacagcagcgtctgcatgacagggtggtgtccaagtccgccgtccgtgactcctggaaccacgacatgacagacttcttagaaaacccactggggacagaagcctctaaagtttgcagctctccacccatccacatgaaggtgcagcctctgaaccagacggcactgcaggtgtcctggagccagccggagactatctaccacccacccatcatgaactacatgatctcctacagctggaccaagaatgaggacgagaaggagaagacgtttacaaaggacagcgacaaagacttgaaagccaccattagccatgtctcacccgatagcctttacctgttccgagtccaggccgtgtgtcggaacgacatgcgcagcgactttagccagacgatgctgtttcaagctaataccactcgaatattccaagggaccagaatagtgaaaacaggagtgcccacagcgtctcctgcctcttcagccgacatggcccccatcagctcggggtcttctacctggacgtcctctggcatcccattctcatttgtttccatggcaactgggatgggcccctcctccagtggcagccaggccacagtggcctcggtggtcaccagcacgctgctcgccggcctggggttcggcggtggtggcatctcctctttccccagcactgtgtggcccacgcgcctcccgacggccgcctcagccagcaagcaggcggttaggccagtcctagccaccacagaggccttggcttctccagggcccgatggtgattcgtcaccaaccaaggacggcgagggcaccgaggaaggagagaaggatgagaaaagcgagagtgaggatggggagcgggagcacgaggaggatggagagaaggactccgaaaagaaggagaagagtggggtgacccacgctgccgaggagcggaatcagacggagcccagccccacaccctcgtctcctaacaggactgccgagggagggcatcagactatacctgggcatgagcaggatcacactgccgtccccacagaccagacgggcggaaggagggatgccggcccaggcctggaccccgacatggtcacctccacccaagtgccccccaccgccacagaggagcagtatgcagggagtgatcccaagaggcccgaaatgccatctaaaaagcctatgtcccgcggggaccgattttctgaagacagcagatttatcactgttaatccagcggaaaaaaacacctctggaatgataagccgccctgctccagggaggatggagtggatcatccctctgattgtggtatcagccttgaccttcgtgtgcctcatccttctcactgctgtgctcgtttactggagagggtgtaacaaaataaagtccaagggctttcccagacgtttccgtgaagtgccttcttctggggagagaggagagaaggggagcagaaaatgttttcagactgctcatttctatgtggaagacagcagttcacctcgagtggtccctaatgaaagtattcctattattcctattccggatgacatggaagccattcctgtcaaacagtttgtcaaacacatcggtgagctctattctaataaccagcatgggttctctgaggattttgaggaagtccagcgctgtactgctgatatgaacatcactgcagagcattccaatcatccagaaaacaagcacaaaaacagatacatcaacattttagcatatgatcacagtagggtgaagttaagacctttaccaggaaaagactctaagcacagcgactacattaatgcaaactatgttgatggttacaacaaagcaaaagcctacattgccacccaaggacctttgaagtctacatttgaagatttctggaggatgatttgggaacaaaacactggaatcattgtgatgattacgaaccttgtggaaaaaggaagacgaaaatgtgatcagtattggccaacagagaacagtgaggaatatggaaacattattgtcacgctgaagagcacaaaaatacatgcctgctacactgttcgtcgtttttcaatcagaaatacaaaagtgaaaaagggtcagaagggaaatcccaagggtcgtcagaatgaaagggtagtgatccagtatcactatacacagtggcctgacatgggagttcccgagtatgcccttccagtactgactttcgtgaggagatcctcagcagctcggatgccagaaacgggccctgtgttggtgcactgcagtgctggtgtgggcagaacaggcacctatattgtaatagacagcatgctgcaacagataaaagacaaaagcacagttaacgtcctgggattcctgaagcatatcaggacacagcgtaactacctcgtccagactgaggagcagtacattttcatccatgatgccttgttggaagccattcttggaaaggagactgaagtatcttcaaatcagctgcacagctatgttaacagcatccttataccaggagtaggaggaaagacacgactggaaaagcaattcaagctggtcacacagtgtaatgcaaaatatgtggaatgtttcagtgctcagaaagagtgtaacaaagaaaagaacagaaactctncagttgtgccatctgagcgtgctcgagtgggtcttgcaccattgcctggaatgaaaggaacagattacattaatgcttcttatatcatgggctattataggagcaatgaatttattataactcagcatcctctgccacatactacgaaagatttctggcgaatgatttgggatcataacgcacagatcattgtcatgctgccagacaaccagagcttggcagaagatgagtttgtgtactggccaagtcgagaagaatccatgaactgtgaggcctttaccgtcacccttatcagcaaagacagactgtgcctctctaatgaagaacaaattatcatccatgactttatccttgaagctacacaggatgactatgtcttagaagttcggcactttcagtgtcccaaatggcctaacccagatgcccccataagtagtacctttgaacttatcaacgtcatcaaggaagaggccttaacaagggatggtcccaccattgttcatgatgagtatggagcagtttcagcaggaatgttatgtgcccttaccaccctgtcccagcaactggagaatgaaaatgctgtggatgttttccaggttgcaaaaatgatcaatcttatgaggcctggagtattcacagacattgaacaataccagttcatctataaagcaaggcttagcttggtcagcactaaagaaaatggaaatggtcccatgacagtagacaaaaatggtgctgttcttattgcagatgaatcagaccctgctgagagcatggagtccctagtgtgactggaatcctgaaagggcacttaatttgtaaacttctgaagactgagaacttttttgaggccttttttgccagactctaggttatacaataacccagttacttttttacactgataaaagttttgatatttattttttgccattttatgtcttaatggtatcctactgagcatttgcacctctgttcatttcacacagtgaaacgcaattttacctagtttgcactatatgatcagtgttactgcctataatcttatacaacagcaaaccctgatgtgacattccatgacgacatacatgctacttttttttagttcaatacagtgaaggtctttgttatgacagtgaatattgcttttattattattattgctgaagtggttgcattctactagcaggcaatgctgtacttttcttcagtcctcctctcctttttattttaggcactgttcaatactgtatgccttctgtattttaatggagtggatagcattgttttcttttacagactagcaggctactgggacctaaaaaggtctgttaatgtcatggncttgaaacagttccatttatgctggttaagagatcccttaagaagttagaaggcttaagaactgcttcatgtgaacatcccttattagttacaaagttatattcacagttttttaaaaatgtgtcaaaataaaggataactctgtattacagctttcacagtagctatgtggacaatgtgttatttccattttgactctctaaaatagctacatcctaaaatcagggctatctttaacaatagcaagatagcaatattatatacaactcagttatgagaccctttagttattctccattaatgcttcttagtttgtaataccatacctcacagtaggtagaagaatgaaaacttctgcaggtgtgtaattttgaaactagtcctctaaaaattccctattactcctatagcaactaataaa

SEQ ID NO: 114 - DNA, 759 bp, human
atgggcaagaacaagcagccacgcggccagcagaggcaggggggcccgccggccgcggacgccgctgggcccgacgacatggagccgaagaagggcacgggggcccccaaggagtgcggggaggaggagccccggacctgctgcggctgccggttcccgctgctgctcgccctgctgcagctggccctgggcatcgccgtgaccgtggtgggcttcctcatggcgagcatcagctcctccctgctagtcagggacactccattttgggctgggatcattgtctgcttagtggcctatcttggcttgtttatgctttgtgtctcatatcaggttgacgaacggacatgtattcaattttctatgaaactgttatactttctgctgagtgccctgggcctgacggtctgtgtgctggccgtggcctttgccgcccaccactattcgcagctcacacagtttacctgtgagaccacactcgactcttgccagtgcaaactgccctcctcggagccgctcagcaggacctttgtttaccgggatgtgacggactgtaccagcgtcactggcactttcaaactgttcttactcatccagatgattcttaatttggtctgcggccttgtgtgcttgttggcctgctttgtgatgtggaaacataggtaccaggtcttctatgtgggtgtcaggatatgctccctcacggcttccgaaggcccccagcaaaagatctaacattcttgctcaaagttgcgagagaaa

SEQ ID NO: 115 - DNA, 690 bp, human
cagcacatcccgctctgggctttaaacgtgacccctcgcctcgactcgccctgccctgtgaaaatgttggtgcttcttgctttcatcatcgccttccacatcacctctgcagccttgctgttcattgccaccgtcgacaatgcctggtgggtaggagatgagttttttgcagatgtctggagaatatgtaccaacaacacgaattgcacagtcatcaatgacagctttcaagagtactccacgctgcaggcggtccaggccaccatgatcctctccaccattctctgctgcatcgccttcttcatcttcgtgctccagctcttccgcctgaagcagggagagaggtttgtcctaacctccatcatccagctaatgtcatgtctgtgtgtcatgattgcggcctccatttatacagacaggcgtgaagacattcacgacaaaaacgcgaaattctatcccgtgaccagagaaggcagctacggctactcctacatcctggcgtgggtggccttcgcctgcaccttcatcagcggcatgatgtacctgatactgaggaagcgcaaatagagttccggagctgggttgcttctgctgcagtacagaatccacattcagataaccattttgtatataatcattattttttgaggtttttctagcaaaccgtattgtttcctttaaaagccaaaa

SEQ ID NO: 116 - DNA, 5645 bp, human
cgcccgcgcgctgcagccccatctcctagcggcagcccaggcgcggagggagcgagtccgccccgaggtaggtccaggacgggcgcacagcagcagccgaggctggccgggagagggaggaagaggatggcagggccacgccccagcccatgggccaggctgctcctggcagccttgatcagcgtcagcctctctgggaccttggcaaaccgctgcaagaaggccccagtgaagagctgcacggagtgtgtccgtgtggataaggactgcgcctactgcacagacgagatgttcagggaccggcgctgcaacacccaggcggagctgctggccgcgggctgccagcgggagagcatcgtggtcatggagagcagcttccaaatcacagaggagacccagattgacaccaccctgcggcgcagccagatgtccccccaaggcctgcgggtccgtctgcggcccggtgaggagcggcattttgagctggaggtgtttgagccactggagagccccgtggacctgtacatcctcatggacttctccaactccatgtccgatgatctggacaacctcaagaagatggggcagaacctggctcgggtcctgagccagctcaccagcgactacactattggatttggcaagtttgtggacaaagtcagcgtcccgcagacggacatgaggcctgagaagctgaaggagccctggcccaacagtgacccccccttctccttcaagaacgtcatcagcctgacagaagatgtggatgagttccggaataaactgcagggagagcggatctcaggcaacctggatgctcctgagggcggcttcgatgccatcctgcagacagctgtgtgcacgagggacattggctggcgcccggacagcacccacctgctggtcttctccaccgagtcagccttccactatgaggctgatggcgccaacgtgctggctggcatcatgagccgcaacgatgaacggtgccacctggacaccacgggcacctacacccagtacaggacacaggactacccgtcggtgcccaccctggtgcgcctgctcgccaagcacaacatcatccccatctttgctgtcaccaactactcctatagctactacgagaagcttcacacctatttccctgtctcctcactgggggtgctgcaggaggactcgtccaacatcgtggagctgctggaggaggccttcaatcggatccgctccaacctggacatccgggccctagacagcccccgaggccttcggacagaggtcacctccaagatgttccagaagacgaggactgggtcctttcacatccggcggggggaagtgggtatataccaggtgcagctgcgggcccttgagcacgtggatgggacgcacgtgtgccagctgccggaggaccagaagggcaacatccatctgaaaccttccttctccgacggcctcaagatggacgcgggcatcatctgtgatgtgtgcacctgcgagctgcaaaaagaggtgcggtcagctcgctgcagcttcaacggagacttcgtgtgcggacagtgtgtgtgcagcgagggctggagtggccagacctgcaactgctccaccggctctctgagtgacattcagccctgcctgcgggagggcgaggacaagccgtgctccggccgtggggagtgccagtgcgggcactgtgtgtgctacggcgaaggccgctacgagggtcagttctgcgagtatgacaacttccagtgtccccgcacttccgggttcctctgcaatgaccgaggacgctgctccatgggccagtgtgtgtgtgagcctggttggacaggcccaagctgtgactgtcccctcagcaatgccacctgcatcgacagcaatgggggcatctgtaatggacgtggccactgtgagtgtggccgctgccactgccaccagcagtcgctctacacggacaccatctgcgagatcaactactcggcgatccacccgggcctctgcgaggacctacgctcctgcgtgcagtgccaggcgtggggcaccggcgagaagaaggggcgcacgtgtgaggaatgcaacttcaaggtcaagatggtggacgagcttaagagagccgaggaggtggtggtgcgctgctccttccgggacgaggatgacgactgcacctacagctacaccatggaaggtgacggcgcccctgggcccaacagcactgtcctggtgcacaagaagaaggactgccctccgggctccttctggtggctcatccccctgctcctcctcctcctgccgctcctggccctgctactgctgctatgctggaagtactgtgcctgctgcaaggcctgcctggcacttctcccgtgctgcaaccgaggtcacatggtgggctttaaggaagaccactacatgctgcgggagaacctgatggcctctgaccacttggacacgcccatgctgcgcagcgggaacctcaagggccgtgacgtggtccgctggaaggtcaccaacaacatgcagcggcctggctttgccactcatgccgccagcatcaaccccacagagctggtgccctacgggctgtccttgcgcctggcccgcctttgcaccgagaacctgctgaagcctgacactcgggagtgcgcccagctgcgccaggaggtggaggagaacctgaacgaggtctacaggcagatctccggtgtacacaagctccagcagaccaagttccggcagcagcccaatgccgggaaaaagcaagaccacaccattgtggacacagtgctgatggcgccccgctcggccaagccggccctgctgaagcttacagagaagcaggtggaacagagggccttccacgacctcaaggtggcccccggctactacaccctcactgcagaccaggacgcccggggcatggtggagttccaggagggcgtggagctggtggacgtacgggtgcccctctttatccggcctgaggatgacgacgagaagcagctgctggtggaggccatcgacgtgcccgcaggcactgccaccctcggccgccgcctggtaaacatcaccatcatcaaggagcaagccagagacgtggtgtcctttgagcagcctgagttctcggtcagccgcggggaccaggtggcccgcatccctgtcatccggcgtgtcctggacggcgggaagtcccaggtctcctaccgcacacaggatggcaccgcgcagggcaaccgggactacatccccgtggagggtgagctgctgttccagcctggggaggcctggaaagagctgcaggtgaagctcctggagctgcaagaagttgactccctcctgcggggccgccaggtccgccgtttccacgtccagctcagcaaccctaagtttggggcccacctgggccagccccactccaccaccatcatcatcagggacccagatgaactggaccggagcttcacgagtcagatgttgtcatcacagccaccccctcacggcgacctgggcgccccgcagaaccccaatgctaaggccgctgggtccaggaagatccatttcaactggctgcccccttctggcaagccaatggggtacagggtaaagtactggattcagggtgactccgaatccgaagcccacctgctcgacagcaaggtgccctcagtggagctcaccaacctgtacccgtattgcgactatgagatgaaggtgtgcgcctacggggctcagggcgagggaccctacagctccctggtgtcctgccgcacccaccaggaagtgcccagcgagccagggcgtctggccttcaatgtcgtctcctccacggtgacccagctgagctgggctgagccggctgagaccaacggtgagatcacagcctacgaggtctgctatggcctggtcaacgatgacaaccgacctattgggcccatgaagaaagtgctggttgacaaccctaagaaccggatgctgcttattgagaaccttcgggagtcccagccctaccgctacacggtgaaggcgcgcaacggggccggctgggggcctgagcgggaggccatcatcaacctggccacccagcccaagaggcccatgtccatccccatcatccctgacatccctatcgtggacgcccagagcggggaggactacgacagcttccttatgtacagcgatgacgttctacgctctccatcgggcagccagaggcccagcgtctccgatgacactgagcacctggtgaatggccggatggactttgccttcccgggcagcaccaactccctgcacaggatgaccacgaccagtgctgctgcctatggcacccacctgagcccacacgtgccccaccgcgtgctaagcacatcctccaccctcacacgggactacaactcactgacccgctcagaacactcacactcgaccacactgccgagggactactccaccctcacctccgtctcctcccacgactctcgcctgactgctggtgtgcccgacacgcccacccgcctggtgttctctgccctggggcccacatctctcagagtgagctggcaggagccgcggtgcgagcggccgctgcagggctacagtgtggagtaccagctgctgaacggcggtgagctgcatcggctcaacatccccaaccctgcccagacctcggtggtggtggaagacctcctgcccaaccactcctacgtgttccgcgtgcgggcccagagccaggaaggctggggccgagagcgtgagggtgtcatcaccattgaatcccaggtgcacccgcagagcccactgtgtcccctgccaggctccgccttcactttgagcactcccagtgccccaggcccgctggtgttcactgccctgagcccagactcgctgcagctgagctgggagcggccacggaggcccaatggggatatcgtcggctacctggtgacctgtgagatggcccaaggaggagggccagccaccgcattccgggtggatggagacagccccgagagccggctgaccgtgccgggcctcagcgagaacgtgccctacaagttcaaggtgcaggccaggaccactgagggcttcgggccagagcgcgagggcatcatcaccatagagtcccaggatggaggacccttcccgcagctgggcagccgtgccgggctcttccagcacccgctgcaaagcgagtacagcagcatcaccaccacccacaccagcgccaccgagcccttcctagtggatgggccgaccctgggggcccagcacctggaggcaggcggctccctcacccggcatgtgacccaggagtttgtgagccggacactgaccaccagcggaacccttagcacccacatggaccaacagttcttccaaacttgaccgcaccctgccccacccccgccatgtcccactaggcgtcctcccgactcctctcccggagcctcctcagctactccatccttgcacccctgggggcccagcccacccgcatgcacagagcaggggctaggtgtctcctgggaggcatgaagggggcaaggtccgtcctctgtgggcccaaacctatttgtaaccaaagagctgggagcagcacaaggacccagcctttgttctgcacttaataaatggttttgctactg

SEQ ID NO: 117 - DNA, 5084 bp, human
gatcccatcgcagctaccgcgatgagaggcgctcgcggcgcctgggattttctctgcgttctgctcctactgcttcgcgtccagacaggctcttctcaaccatctgtgagtccaggggaaccgtctccaccatccatccatccaggaaaatcagacttaatagtccgcgtgggcgacgagattaggctgttatgcactgatccgggctttgtcaaatggacttttgagatcctggatgaaacgaatgagaataagcagaatgaatggatcacggaaaaggcagaagccaccaacaccggcaaatacacgtgcaccaacaaacacggcttaagcaattccatttatgtgtttgttagagatcctgccaagcttttccttgttgaccgctccttgtatgggaaagaagacaacgacacgctggtccgctgtcctctcacagacccagaagtgaccaattattccctcaaggggtgccaggggaagcctcttcccaaggacttgaggtttattcctgaccccaaggcgggcatcatgatcaaaagtgtgaaacgcgcctaccatcggctctgtctgcattgttctgtggaccaggagggcaagtcagtgctgtcggaaaaattcatcctgaaagtgaggccagccttcaaagctgtgcctgttgtgtctgtgtccaaagcaagctatcttcttagggaaggggaagaattcacagtgacgtgcacaataaaagatgtgtctagttctgtgtactcaacgtggaaaagagaaaacagtcagactaaactacaggagaaatataatagctggcatcacggtgacttcaattatgaacgtcaggcaacgttgactatcagttcagcgagagttaatgattctggagtgttcatgtgttatgccaataatacttttggatcagcaaatgtcacaacaaccttggaagtagtagataaaggattcattaatatcttccccatgataaacactacagtatttgtaaacgatggagaaaatgtagatttgattgttgaatatgaagcattccccaaacctgaacaccagcagtggatctatatgaacagaaccttcactgataaatgggaagattatcccaagtctgagaatgaaagtaatatcagatacgtaagtgaacttcatctaacgagattaaaaggcaccgaaggaggcacttacacattcctagtgtccaattctgacgtcaatgctgccatagcatttaatgtttatgtgaatacaaaaccagaaatcctgacttacgacaggctcgtgaatggcatgctccaatgtgtggcagcaggattcccagagcccacaatagattggtatttttgtccaggaactgagcagagatgctctgcttctgtactgccagtggatgtgcagacactaaactcatctgggccaccgtttggaaagctagtggttcagagttctatagattctagtgcattcaagcacaatggcacggttgaatgtaaggcttacaacgatgtgggcaagacttctgcctattttaactttgcatttaaaggtaacaacaaagagcaaatccatccccacaccctgttcactcctttgctgattggtttcgtaatcgtagctggcatgatgtgcattattgtgatgattctgacctacaaatatttacagaaacccatgtatgaagtacagtggaaggttgttgaggagataaatggaaacaattatgtttacatagacccaacacaacttccttatgatcacaaatgggagtttcccagaaacaggctgagttttgggaaaaccctgggtgctggagctttcgggaaggttgttgaggcaactgcttatggcttaattaagtcagatgcggccatgactgtcgctgtaaagatgctcaagccgagtgcccatttgacagaacgggaagccctcatgtctgaactcaaagtcctgagttaccttggtaatcacatgaatattgtgaatctacttggagcctgcaccattggagggcccaccctggtcattacagaatattgttgctatggtgatcttttgaattttttgagaagaaaacgtgattcatttatttgttcaaagcaggaagatcatgcagaagctgcactttataagaatcttctgcattcaaaggagtcttcctgcagcgatagtactaatgagtacatggacatgaaacctggagtttcttatgttgtcccaaccaaggccgacaaaaggagatctgtgagaataggctcatacatagaaagagatgtgactcccgccatcatggaggatgacgagttggccctagacttagaagacttgctgagcttttcttaccaggtggcaaagggcatggctttcctcgcctccaagaattgtattcacagagacttggcagccagaaatatcctccttactcatggtcggatcacaaagatttgtgattttggtctagccagagacatcaagaatgattctaattatgtggttaaaggaaacgctcgactacctgtgaagtggatggcacctgaaagcattttcaactgtgtatacacgtttgaaagtgacgtctggtcctatgggatttttctttgggagctgttctctttaggaagcagcccctatcctggaatgccggtcgattctaagttctacaagatgatcaaggaaggcttccggatgctcagccctgaacacgcacctgctgaaatgtatgacataatgaagacttgctgggatgcagatcccctaaaaagaccaacattcaagcaaattgttcagctaattgagaagcagatttcagagagcaccaatcatatttactccaacttagcaaactgcagccccaaccgacagaagcccgtggtagaccattctgtgcggatcaattctgtcggcagcaccgcttcctcctcccagcctctgcttgtgcacgacgatgtctgagcagaatcagtgtttgggtcacccctccaggaatgatctcttcttttggcttccatgatggttattttcttttctttcaacttgcatccaactccaggatagtgggcaccccactgcaatcctgtctttctgagcacactttagtggccgatgatttttgtcatcagccaccatcctattgcaaaggttccaactgtatatattcccaatagcaacgtagcttctaccatgaacagaaaacattctgatttggaaaaagagagggaggtatggactgggggccagagtcctttccaaggcttctccaattctgcccaaaaatatggttgatagtttacctgaataaatggtagtaatcacagttggccttcagaaccatccatagtagtatgatgatacaagattagaagctgaaaacctaagtcctttatgtggaaaacagaacatcattagaacaaaggacagagtatgaacacctgggcttaagaaatctagtatttcatgctgggaatgagacataggccatgaaaaaaatgatccccaagtgtgaacaaaagatgctcttctgtggaccactgcatgagcttttatactaccgacctggtttttaaatagagtttgctattagagcattgaattggagagaaggcctccctagccagcacttgtatatacgcatctataaattgtccgtgttcatacatttgaggggaaaacaccataaggtttcgtttctgtatacaaccctggcattatgtccactgtgtatagaagtagattaagagccatataagtttgaaggaaacagttaataccattttttaaggaaacaatataaccacaaagcacagtttgaacaaaatctcctcttttagctgatgaacttattctgtagattctgtggaacaagcctatcagcttcagaatggcattgtactcaatggatttgatgctgtttgacaaagttactgattcactgcatggctcccacaggagtgggaaaacactgccatcttagtttggattcttatgtagcaggaaataaagtataggtttagcctccttcgcaggcatgtcctggacaccgggccagtatctatatatgtgtatgtacgtttgtatgtgtgtagacaaatatttggaggggtatttttgccctgagtccaagagggtcctttagtacctgaaaagtaacttggctttcattattagtactgctcttgtttcttttcacatagctgtctagagtagcttaccagaagcttccatagtggtgcagaggaagtggaaggcatcagtccctatgtatttgcagttcacctgcacttaaggcactctgttatttagactcatcttactgtacctgttccttagaccttccataatgctactgtctcactgaaacatttaaattttaccctttagactgtagcctggatattattcttgtagtttacctctttaaaaacaaaacaaaacaaaacaaaaaactccccttcctcactgcccaatataaaaggcaaatgtgtacatggcagagtttgtgtgttgtcttgaaagattcaggtatgttgcctttatggtttcccccttctacatttcttagactacatttagagaactgtggccgttatctggaagtaaccatttgcactggagttctatgctctcgcacctttccaaagttaacagattttggggttgtgttgtcacccaagagattgttgtttgccatactttgtctgaaaaattcctttgtgtttctattgacttcaatgatagtaagaaaagtggttgttagttatagatgtctaggtacttcaggggcacttcattgagagttttgtcttgccatactttgtctgaaaaattcctttgtgtttctattgacttcaatgatagtaagaaaagtggttgttagttatagatgtctaggtacttcaggggcacttcattgagagttttgtcaatgtcttttgaatattcccaagcccatgagtccttgaaaatattttttatatatacagtaactttatgtgtaaatacataagcggcgtaagtttaaaggatgttggtgttccacgtgttttattcctgtatgttgtccaattgttgacagttctgaagaattc

SEQ ID NO: 118 - DNA, 2243 bp, human
aggcagccagcagcccgcgcgggagccggaccgccgccggaggagctcggacggcatgctgagccccctccttggctgaagcccgagtgcggagaagcccgggcaaacgcaggctaaggagaccaaagcggcgaagtcgcgagacagcggacaagcagcggaggagaaggaggaggaggcgaacccagagaggggcagcaaaagaagcggtggtggtgggcgtcgtggccatggcggcggctatcgccagctcgctcatccgtcagaagaggcaagcccgcgagcgcgagaaatccaacgcctgcaagtgtgtcagcagccccagcaaaggcaagaccagctgcgacaaaaacaagttaaatgtcttttcccgggtcaaactcttcggctccaagaagaggcgcagaagaagaccagagcctcagcttaagggtatagttaccaagctatacagccgacaaggctaccacttgcagctgcaggcggatggaaccattgatggcaccaaagatgaggacagcacttacactctgtttaacctcatccctgtgggtctgcgagtggtggctatccaaggagttcaaaccaagctgtacttggcaatgaacagtgagggatacttgtacacctcggaacttttcacacctgagtgcaaattcaaagaatcagtgtttgaaaattattatgtgacatattcatcaatgatataccgtcagcagcagtcaggccgagggtggtatctgggtctgaacaaagaaggagagatcatgaaaggcaaccatgtgaagaagaacaagcctgcagctcattttctgcctaaaccactgaaagtggccatgtacaaggagccatcactgcacgatctcacggagttctcccgatctggaagcgggaccccaaccaagagcagaagtgtctctggcgtgctgaacggaggcaaatccatgagccacaatgaatcaacgtagccagtgagggcaaaagaagggctctgtaacagaaccttacctccaggtgctgttgaattcttctagcagtccttcacccaaaagttcaaatttgtcagtgacatttaccaaacaaacaggcagagttcactattctatctgccattagaccttcttatcatccatactaaagccccattatttagattgagcttgtgcataagaatgccaagcattttagtgaactaaatctgagagaaggactgccaaattttctcatgatctcacctatgactttggggatgataatccaaaagtatttcacagcactaatgctgatcaaaatttgctctcccaccaagaaaatgtaaaagaccacaattgttcttcaaaaacaaacaaaacaaaacaaaacaaaattaactgcttaaatgttttgtcggggcaaacaaaattatgtgaattgtgttgttttcttggcttgatgttttctatctacgcttgattcacatgtactcttttctttggcatagtgcaactttatgatttctgaaattcaatggttctattgactttttgcgtcacttaatccaaatcaaccaaattcagggttgaatctgaattggcttctcaggctcaaggtaacagtgttcttgtggtttgaccaattgtttttctttctttttttttttttagatttgtggtattctggtcaagttattgtgctgtactttgtgcgtagaaatggagttgtattgtcaaccccagtcagtaaagagaacttcaaaaaattatcctcaagtgtagatttctcttaattccatttgtgtatcatgttaaactattgttgtggcttcttgtgtaaagacaggaactgtggaactgtgatgttgtcttttgtgttgttaaaataagaaatgtcttatctgtatatgtatgagtcttcctgtcattgtatttggcacatgaatattgtgtacaaggaattgttaagactggttttccctcaacaacatatattatacttgctactggaaaagtgtttaagacttagctaggtttccatttagatcttcatatctgttgcatggaagaaagttgggttcttggcatagagttgcatgatatgtaagattttgtgcattcataattgttaaaaatctgtgttccaaaagtggacatagtatgtacaggcagttttctgtcctgtgcacaaaaagtttaaaaaagttgtttaatatttgttgttgtatacccaaatacgcaccgaataaactctttatattcattcaaaga

SEQ ID NO: 119 - DNA, 1004 bp, human
gcctcgctcgggcgcccagtggtcctgccgcctggtctcacctcgccatggttcgtctgcctctgcagtgcgtcctctggggctgcttgctgaccgctgtccatccagaaccacccactgcatgcagagaaaaacagtacctaataaacagtcagtgctgttctttgtgccagccaggacagaaactggtgagtgactgcacagagttcactgaaacggaatgccttccttgcggtgaaagcgaattcctagacacctggaacagagagacacactgccaccagcacaaatactgcgaccccaacctagggcttcgggtccagcagaagggcacctcagaaacagacaccatctgcacctgtgaagaaggctggcactgtacgagtgaggcctgtgagagctgtgtcctgcaccgctcatgctcgcccggctttggggtcaagcagattgctacaggggtttctgataccatctgcgagccctgcccagtcggcttcttctccaatgtgtcatctgctttcgaaaaatgtcacccttggacaagctgtgagaccaaagacctggttgtgcaacaggcaggcacaaacaagactgatgttgtctgtggtccccaggatcggctgagagccctggtggtgatccccatcatcttcgggatcctgtttgccatcctcttggtgctggtctttatcaaaaaggtggccaagaagccaaccaataaggccccccaccccaagcaggaaccccaggagatcaattttcccgacgatcttcctggctccaacactgctgctccagtgcaggagactttacatggatgccaaccggtcacccaggaggatggcaaagagagtcgcatctcagtgcaggagagacagtgaggctgcacccacccaggagtgtggccacgtgggcaaacaggcagttggccagagagcctggtgctgctgctgcaggggtgcaggcagaagcggggagctatgcccagtcagtgccagcccctc

SEQ ID NO: 120 - DNA, 3096 bp, human
catcttgcatcagcctgtggatgtatgcctaccaccgggctccttcaccagcaaagtggaaaaagaagcgtttcacaacaaattcttctttttgggttggggaaacgcagtggattatagctctgttttcttctttccaaaactgtgcacccctggatgaaacctccatcaagggagacctacaagttgcctggggttcagtgctctagaaagttccaaggtttgtggcttgaattattctaaagaagctgaaataattgaagagaagcagaggccagctgtttttgaggatcctgctccacagagaatgctctgcacccgttgatactccagttccaacaccatcttctgagatgatcctgattcccagaatgctcttggtgctgttcctgctgctgcctatcttgagttctgcaaaagctcaggttaatccagctatatgccgctatcctctgggcatgtcaggaggccagattccagatgaggacatcacagcttccagtcagtggtcagagtccacagctgccaaatatggaaggctggactcagaagaaggggatggagcctggtgccctgagattccagtggaacctgatgacctgaaggagtttctgcagattgacttgcacaccctccattttatcactctggtggggacccaggggcgccatgcaggaggtcatggcatcgagtttgcccccatgtacaagatcaattacagtcgggatggcactcgctggatctcttggcggaaccgtcatgggaaacaggtgctggatggaaatagtaacccctatgacattttcctaaaggacttggagccgcccattgtagccagatttgtccggttcattccagtcaccgaccactccatgaatgtgtgtatgagagtggagctttacggctgtgtctggctagatggcttggtgtcttacaatgctccagctgggcagcagtttgtactccctggaggttccatcatttatctgaatgattctgtctatgatggagctgttggatacagcatgacagaagggctaggccaattgaccgatggtgtgtctggcctggacgatttcacccagacccatgaataccacgtgtggcccggctatgactatgtgggctggcggaacgagagtgccaccaatggctacattgagatcatgtttgaatttgaccgcatcaggaatttcactaccatgaaggtccactgcaacaacatgtttgctaaaggtgtgaagatctttaaggaggtacagtgctacttccgctctgaagccagtgagtgggaacctaatgccatttccttcccccttgtcctggatgacgtcaaccccagtgctcggtttgtcacggtgcctctccaccaccgaatggccagtgccatcaagtgtcaataccattttgcagatacctggatgatgttcagtgagatcaccttccaatcagatgctgcaatgtacaacaactctgaagccctgcccacctctcctatggcacccacaacctatgatccaatgcttaaagttgatgacagcaacactcggatcctgattggctgcttggtggccatcatctttatcctcctggccatcattgtcatcatcctctggaggcagttctggcagaaaatgctggagaaggcttctcggaggatgctggatgatgaaatgacagtcagcctttccctgccaagtgattctagcatgttcaacaataaccgctcctcatcacctagtgaacaagggtccaactcgacttacgatcgcatctttccccttcgccctgactaccaggagccatccaggctgatacgaaaactcccagaatttgctccaggggaggaggagtcaggctgcagcggtgttgtgaagccagtccagcccagtggccctgagggggtgccccactatgcagaggctgacatagtgaacctccaaggagtgacaggaggcaacacatactcagtgcctgccgtcaccatggacctgctctcaggaaaagatgtggctgtggaggagttccccaggaaactcctaactttcaaagagaagctgggagaaggacagtttggggaggttcatctctgtgaagtggagggaatggaaaaattcaaagacaaagattttgccctagatgtcagtgccaaccagcctgtcctggtggctgtgaaaatgctccgagcagatgccaacaagaatgccaggaatgattttcttaaggagataaagatcatgtctcggctcaaggacccaaacatcatccatctattatctgtgtgtatcactgatgaccctctctgtatgatcactgaatacatggagaatggagatctcaatcagtttctttcccgccacgagccccctaattcttcctccagcgatgtacgcactgtcagttacaccaatctgaagtttatggctacccaaattgcctctggcatgaagtacctttcctctcttaattttgttcaccgagatctggccacacgaaactgtttagtgggtaagaactacacaatcaagatagctgactttggaatgagcaggaacctgtacagtggtgactattaccggatccagggccgggcagtgctccctatccgctggatgtcttgggagagtatcttgctgggcaagttcactacagcaagtgatgtgtgggcctttggggttactttgtgggagactttcaccttttgtcaagaacagccctattcccagctgtcagatgaacaggttattgagaatactggagagttcttccgagaccaagggaggcagacttacctccctcaaccagccatttgtcctgactctgtgtataagctgatgctcagctgctggagaagagatacgaagaaccgtccctcattccaagaaatccaccttctgctccttcaacaaggcgacgagtgatgctgtcagtgcctggccatgttcctacggctcaggtcctccctacaagacctaccactcacccatgcctatgccactccatctggacatttaatgaaactgagagacagaggcttgtttgctttgccctcttttcctggtcacccccactccctacccctgactcatatatact

SEQ ID NO: 121 - DNA, 3516 bp, human
ggatcctggagacaactttgccgtgtgacgcgccgggaggactgcagggcccgcggccgagggctcggcgccgcctgtgagcgggcccgcgcggccggctctcccgggcaccaagcttgctccgcgccactgcccgccggcccgcggcgaggacgacctgcccgtctccgccgccggcggcccttcctggcgcgaggcagtgagggcgaggcgctcaggtgcgagcgcggggccccgccgcagcgcccgccgcagcgccgcgccaagccgcgcccggctccgctccggggggctccagcgccttcgcttccgtctcagccaagttgcgtggacccgctctttcgccaccttccccagccgccggccgaaccgccgctcccactgacgctgctttcgcttcacccgaaccggggctgcggggcccccgacgcggaaaggatggggagaaggctgcagatgccgaggcgccccgagacgcccgtgcggcagtgacccgcgacctccgccccgcccggcgcgcccctcgggcccccggggccctcggcgccccttccctgccgcgcgggaacccccgaggcccggccggccccctccccctgcgagccggcggcagccctcccggcgggcgggcgggcggaggcccgggcgggcgcgggcgcgggcgggggcggggcggggcggcgcgcccggagcccggagcccggccctgcgctcggctcgactcggctcgcctcgcggcgggcgccctcgtcgccagcggcgcaccatggacgggctgcccggtcgggcgctgggggccgcctgccttctgctgctggcggccggctggctggggcctgaggcctggggctcacccacgcccccgccgacgcctgccgcgccgccgccacccccgccacccggagccccgggtggctcgcaggacacctgtacgtcgtgcggcggcttccggcggccagaggagctcggccgagtggacggcgacttcctggaggcggtgaagcggcacatcttgagccgcctgcagatgcggggccggcccaacatcacgcacgccgtgcctaaggccgccatggtcacggccctgcgcaagctgcacgcgggcaaggtgcgcgaggacggccgcgtggagatcccgcacctcgacggccacgccagcccgggcgccgacggccaggagcgcgtttccgaaatcatcagcttcgccgagacagatggcctcgcctcctcccgggtccgcctatacttcttcatctccaacgaaggcaaccagaacctgtttgtggtccaggccagcctgtggctttacctgaaactcctgccctacgtcctggagaagggcagccggcggaaggtgcgggtcaaagtgtacttccaggagcagggccacggtgacaggtggaacatggtggagaagagggtggacctcaagcgcagcggctggcataccttcccactcacggaggccatccaggccttgtttgagcggggcgagcggcgactcaacctagacgtgcagtgtgacagctgccaggagctggccgtggtgccggtgttcgtggacccaggcgaagagtcgcaccgaccctttgtggtggtgcaggctcggctgggcgacagcaggcaccgcattcgcaagcgaggcctggagtgcgatggccggaccaacctctgttgcaggcaacagttcttcattgacttccgcctcatcggctggaacgactggatcatagcacccaccggctactacggcaactactgtgagggcagctgcccagcctacctggcaggggtccccggctctgcctcctccttccacacggctgtggtgaaccagtaccgcatgcggggtctgaaccccggcacggtgaactcctgctgcattcccaccaagctgagcaccatgtccatgctgtacttcgatgatgagtacaacatcgtcaagcgggacgtgcccaacatgattgtggaggagtgcggctgcgcctgacagtgcaaggcaggggcacggtggtggggcacggagggcagtcccgggtgggcttcttccagccccccgcgggaacggggtacacggtgggctgagtacagtcattctgttgggctgtggagatagtgccagggtgcggcctgagatatttttctacagcttcatagagcaaccagtcaaaaccagagcgagaaccctcaactgacatgaaatactttaaaatgcacacgtagccacgcacagccagacgcatcctgccacccacacagcagcctccaggataccagcaaatggatgcggtgacaaatggcagcttagctacaaatgcctgtcagtcggagagaatggggtgagcagccaccattccaccagctggcccggccacgtctcgaagttgcgccttcccgagcacacataaaagcacaaagacagagacgcagagagagagagagagccacggagaggaaaagcagatgcaggggtggggagcgcagctcggcggaggctgcgtgtgccccgtggcttttaccaggcctgctctgcctggctcgatgtctgcttcttcccagcctgggatccttcgtgcttcaaggcctggggagcctgtccttccatgcccttgtcgagggaaagagacccagaaaggacacaacccgtcagagacctgggagcaggggcaatgaccgtttgactgtttgtggcttgggcctctgacatgacttatgtgtgtgtgtgtttttggggtggggagggagggagagaagagggggctaaatttgatgctttaactgatctccaacagttgacaggtcatccttgccagttgtataactgaaaaaggacttttctaccaggtatgaccttttaagtgaaaatctgaattgttctaaatggaaagaaaaaaagttgcaatctgtgcccttcattggggacattcctctaggactggtttggggacgggtgggaatgacccctaggcaaggggatgagaccgcaggaggaaatggcggggaggtggcattcttgaactgctgaggatggggggtgtcccctcagcggaggccaagggaggggagcagcctagttggtcttggagagatggggaaggctttcagctgatttgcagaagttgcccatgtgggcccaaccatcagggctggccgtggacgtggcccctgcccactcacctgcccgcctgcccgcccgcccgcatagcacttgcagacctgcctgaacgcacatgacatagcacttgccgatctgcgtgtgcccagaagtggcccttggccgagcgccgaactcgctcgccctctagatgtccaagtgccacgtgaactatgcaatttaaagggttgacccacactagacgaaactggactcgtacgactctttttatattttttatacttgaaatgaaatcctttgcttcttttttaagcgaatgattgcttttaatgtttgcactgatttagttgcatgattagtcagaaactgccatttgaaaaaaaagttatttttatagcagc

SEQ ID NO: 122 - DNA, 2804 bp, human
tcgcagagccgccgatgcgtgtccagtgacccggacagcaaggcccgcgcgcggcgggggcggcggcagacgcctggtcaccgtgaccccgattttggatttaccgcttgggggctggggggatcctggatttaactggcgactgttttgggggacgccggacgccatgttgtggaaaataaccgataatgtcaagtacgaagaggactgcgaggatcgccacgacgggagcagcaatgggaatccgcgggtcccccacctctcctccgccgggcagcacctctacagccccgcgccacccctctcccacactggagtcgccgaatatcagccgccaccctactttccccctccctaccagcagctggcctactcccagtcggccgacccctactcgcatctgggggaagcgtacgccgccgccatcaaccccctgcaccagccggcgcccacaggcagccagcagcaggcctggcccggccgccagagccaggagggagcggggctgccctcgcaccacgggcgcccggccggcctactgccccacctctccgggctggaggcgggcgcggtgagcgcccgcagggatgcctaccgccgctccgacctgctgctgccccacgcacacgccctggatgccgcgggcctggccgagaacctggggctccacgacatgcctcaccagatggacgaggtgcagaatgtcgacgaccagcacctgttgctgcacgatcagacagtcattcgcaaaggtcccatttccatgaccaagaaccctctgaacctcccctgtcagaaggagctggtgggggccgtaatgaaccccactgaggtcttctgctcagtccctggaagattgtcgctcctcagctctacgtctaaatacaaagtgacagtggctgaagtacagaggcgactgtccccacctgaatgcttaaatgcctcgttactgggaggtgttctcagaagagccaaatcgaaaaatggaggccggtccttgcgggagaagttggacaagatcgggttgaatcttccggccgggaggcggaaagccgctcatgtgactctcctgacatccttagtagaaggtgaagctgttcatttggctagggactttgcctatgtctgtgaagccgaatttcctagtaaaccagtggcagaatatttaaccagacctcatcttggaggacgaaatgagatggcagctaggaagaacatgctattggcggcccagcaactgtgtaaagaattcacagaacttctcagccaagaccggacaccccatgggaccagcaggctcgccccagtcttggagacgaacatacagaactgcttgtctcatttcagcctgattacccacgggtttggcagccaggccatctgtgccgcggtgtctgccctgcagaactacatcaaagaagccctgattgtcatagacaaatcctacatgaaccctggagaccagagtccagctgattctaacaaaaccctggagaaaatggagaaacacaggaaataaaattggaacgaagaaaggttaggagagtagggaaggaacaggactgcaaaaatccttctccaccgcacagactgggaacccctcctggcctgggggaagagtttgttacctaccttactatttaaagagccttcactggttctgcatcacccgcccctggacttcttagttgtttctctagcgctgagctatctcctaactttggacctattatcagaaggtgacaagtactggctctttattcattaagctttttttttttgaaccccattctttccttctctgaaagtggtgctataagttttagaatcttttaaatacattccctgggccaacagacccacacacttagccattgaaatgtcaaattgatgtgccctagatcaacagatcaacaataccttttttttcagtgttaaggtaatggttggtttttgtgtccgctaaatatttaccttgaaaaaaagaaaagtgtgtatctagcttcttcagagatcaagtcctctggtaggaggcaaaggttctatctgcttagcaactagttaataagtggtatctgacacactctaaaccccgtgttcaaacgggggccttctggttttaggaaacttgtagaaacgaagcctgctgattgatttttttctcctttttttttttttttttttttaactttgaaagttaactcttcaaatgggagactctttgaaatgacatgttcccttaaggtactgaagctttatttgcatatttatttcagatgtttcgagtaaacttgaaaagggtaggcacgaagcaatttgttgctgcttgtcacccccaagtccccgtggaggttctgtattttaagaaacagtgcgttgagtgtacagattttatttatgcgtaatttaatggggtctgtaaatactggtgcacttcttacgacttttttgagacatgggatccaattttaatattaacttttaatggtgatggggtaatctataacacatcataaggttttattcatatatatacagggtattaagaattaagaggatgctgggctctgttcttggcttggaagattctatttaattgaaactctctgttcagaaagcaataactttgtctcgttcctgttgggctgaaccctaaggtgagtgtgcagtacagtgtgtgtgggtgaaatggagatttggaattgaactctctgcctgtaaatgttccccaaataattgttgtgtgtatgatacgtgtataataaaagtattcttgttagaattgaaaaaaaaaaaaaaaaaaa

SEQ ID NO: 123 - DNA, 3040 bp, human
gcctctcttcttgcgctgctcagctgggaacatcgtctcaccaggggcagcagcgacgcgctgcacagccagacaggagctggttgcggggcatggaagcagcctccttggcagccgggagaggagcaagcgcacgccactgcccgtgacccaggcgtccggctgctgtcccctgccggggagctcatccacgcagaggtctctccctgtcctccctgcgagcttttcctctgcagagcccagtggagccagccatgtaccgcggcaacgcttgctgaccccagtgaggagagaggcctgaatccgagggccctggcacctgtgagctcttggctgtcacctgccccaagcctcgcacctccgctccacagcagtccccacaggagacaaccctgacgggagcatggagctgctgtccacgccccacagcattgagatcaacaacatcacctgcgactccttccgcatctcctgggccatggaggacagtgacctggagagggtcacccattacttcattgaccttaacaagaaggagaataagaattccaacaagttcaagcaccgggacgtccccaccaagctcgtggccaaggcagtgccactgcccatgacggtgagaggccactggttcctgagcccccgcacggagtacagtgtggccgtgcagacggcagtgaagcagagcgatggggagtacctggtgtccggctggagcgagacggtggagttctgcactggggattatgccaaggagcacctggctcagcttcaggagaaagctgagcagatcgcaggccgcatgctccgcttctccgtcttctaccgcaaccatcacaaggagtacttccagcatgccaggacccactgcgggaacatgctgcagccttacctgaaggacaacagcggcagccacggctcccccaccagcggtatgctccacggggtcttcttcagctgcaacacggagttcaacacgggccagcccccgcaggactccccctacggccgctggcgcttccagatcccagctcagcgcctcttcaatcccagcaccaacctctactttgcggacttctactgcatgtacacggcctaccactacgccatcctggtgctggcgcccaaaggctccctgggggaccgcttctgccgcgaccgcctgcccctcctggacattgcttgcaacaagttcctgacctgcagcgtggaggatggggagctggtcttccgccacgcccaggacctcatcctggagatcatctacactgagcccgtcgacctgtccctgggcaccctgggggagatcagtgggcaccagctcatgagtctgtctactgccgatgccaagaaggaccccagctgcaagacctgcaacatcagcgtgggccgctagggactcctggggagctggggggcgagggagagatgagcggaaggtggaggtgggtagcccaggttcagggagctggctttctctctcctgcccccctgctccctccactctgcccagctgccctcccctcgccccttggcattggaggcaacagacggtggtcctcttggtaagtgtggcccacacccagcctggtggacatggaaaggcttctcagcctctgtagttggcagctgggctggacttctggagaacttcccctttcctctggtttccttgtcctactgttctttgcctcgtccaggtctctatctcccaaagacctgcccacctcctgggctctcccagggaagcccctctgggccaaagcccatgggtagcttggctgcctccagaagagatgcagagagctgtggggcgatctttcttagtcccactcaccccactcagggccaaccacagaatgccccctccctgctgagctgggtctctggggcttcccactccaggcctggatcccttccttctataaatagtctcctgcaccaccgtgactccctggctgctccttgccccaaagaaccctcttcctgcatgggagagctgtccctccttctccacctgcccaccgggacactccccctgctctctagaaaggaactctctttcttctcttggcactgggggcgtcaggctgtcggatgttccttccttccataccccagcataccttctccttgcttagagtgcaggggtctgagacagcagccactggggttgaggagggggaggagacccctgagacccagaggtgccccttcctcagctgggagtgggccgcctcatgctctgctggggcctggcatggaacgtgagacctgtaagctgtcccgcgggccccggcaccccgcccagctgtgcactttgctcactcgctctgccatggtgccatgactgtactgtgcccatgcgtgacctggactgtggaccctctgctgctccgcctctcccctccccactggctctgtctgctctcctgccaccctgctggccgggagcccctccccggggagttcttggtgaagtccttcccgggcctccttgtgtttttgcctcattcctactgtcacacaggtcacgagggtggactccctacaatcaacaaagcaaacagagagcctgtgggaggggctgacagcagcagccggctgtttgggggatgatggaggtgacatcaggcagaggagagtgcagcctcacagtgactttctcagaggtgacagagatgatggatgagcagctggattttcgtgatgaaggacggaagcagcagcgggccggcaaggccatacctcggtgagggacaggtggacaacggtcacctatctgtagccaggggcagttgtgtggccagctgtctctctgggatgagtcaggaggcctggaggcttggggagaggtgtggagaaggagagaacatggcccaggccctttccttccccctgtgctgacagcattgctgtgggggtggcccactgccctcccctggccctcatgtccccccggggctggggtccgcctgcctgtgctgtgcttgcgacgtgcatcaataaaccaccatggcctgagggccctgctcgtctc

SEQ ID NO: 124 - DNA, 424 bp, human
accagcccagcctttcagtgcaggctccagccctccacccccacccgagttgcaggatgtcgatgacagacttgctgaacgctgaggacatcaagaaggcggtgggagcctttagcgctaccgactccttcgaccacaaaaagttcttccaaatggtcggcctgaagaaaaagagtgcggatgatgtgaagaaggtgtttcacatgctggacaaggacaaaagtggcttcatcgaggaggatgagctgggattcatcctaaaaggcttctccccagatgccagagacctgtctgctaaagaaaccaagatgctgatggctgctggagacaaagatggggacggcaaaattggggttgacgaattctccactctggtggctgaaagctaagaagcactgactgcccctggtcttccacctctctg

SEQ ID NO: 125 - DNA, 802 bp, human
aacaccatgaatctactcctgatccttacctttgttgcagctgctgttgctgccccctttgatgatgatgacaagatcgttgggggctacatctgtgaggagaattctgtcccctaccaggtgtccttgaattctggctaccacttctgcggtggctccctcatcagcgaacagtgggtggtgtcagcaggtcactgctacaagtcccgcatccaggtgagactgggagagcacaacatcgaagtcctggaggggaatgaacagttcatcaatgcggccaagatcatccgccaccccaaatacaacagccggactctggacaatgacatcctgctgatcaagctctcctcacctgccgtcatcaattcccgcgtgtccgccatctctctgcccactgcccctccagctgctggcaccgagtccctcatctccggctggggcaacactctgagttctggtgccgactacccagacgagctgcagtgcctggatgctcctgtgctgagccaggctgagtgtgaagcctcctaccctggaaagattaccaacaacatgttctgtgtgggcttcctcgagggaggcaaggattcctgccagggtgattctggtggccctgtggtctccaatggagagctccaaggaattgtctcctggggctatggctgtgcccagaagaacaggcctggagtctacaccaaggtctacaactatgtggactggattaaggacaccatagctgccaacagctaaagcccccagtccctctgcagtctctataccaataaagtgaccctgctctcac

SEQ ID NO: 126 - DNA, 2272 bp, human
aatgcacagcggtattgatgagtagatccttggattcagaggttggctgaaacgcaccatgcctgcttccatcttttgctctgtaaagttgtgaattgctcatgcctatagggaggaaggatggcacatgggattccttctcaaggcaaagttaccataacggtggatgagtacagctcaaaccccacccaggcattcacgcactacaacatcaaccagagcagattccagcctccacatgtacatatggtcgaccccatcccatatgacactccaaaaccagcgggccacacgcggtttgtctgcatctcagacacacactccagaacagatggtatccagatgccttatggggacatccttctccacacaggcgatttcaccgagctgggactgccctcagaggttaagaagtttaatgactggttaggaaacctgccatatgaatataaaatagtgattgctgggaatcatgaactgacatttgataaggaattcatggcagaccttgttaaacaggactactaccgtttcccctctgtgtccaaattgaaaccagaggactttgacaatgttcagtccctcctgacaaacagtatttacttacaagattcggaggtaacagtgaagggattcaggatatacggtgcaccttggaccccgtggtttaatggatggggctttaacctacccagaggtcagtctctgctggacaagtggaacctcatccctgagggcattgacatactcatgacacatggacctcctctaggttttcgagactgggttccaaaggagcttcaaagagtgggctgtgtggagctgttaaacacggttcagaggcgagtccggcccaagctccatgtgtttggtggaatccatgaaggttatggcatcatgaccgacggttacacaacgtacatcaatgcctcgacgtgtacagtcagctttcaaccgaccaaccctccaattatatttgaccttccaaacccacagggttcctgaagctctaaatgccctattggaatgtgagggaaggtctataaactgccatttttctaattataaacttacattctcttacttatttacaaaccctgtgagttctttttgtaaattgttggaacacaaatgatgctagaggttgtgcttcttattttattttattttaaatggggcatccatttgaaatcagaggaacattgtgaatttgtaaaatgacttctgttttctcaaaggccatgccattgtaaattgttagtgttcgccaaaggacagccaagctttcttttaaaaagtgataaaagtcttattttaatatgctttaagctgaaagaaaaaaaaataagaaacaggcagtgttttaaaaaccaacacagatttgcacaactgtttaagagtattgtttgaaatattttaattttcaatgttttgttgttgttgttttcttggtaatgcttcttttttgcagatgtggtcccaatttatagcaatcttctcaacagaagtaggcatggaaaagacttcttttcatactctcactataaagaaagctgcattgagaagaaaatggctgtcatttaaaggatggtttaactagtgagattcctattgtggttatacaaggtctcattgtttgtttgtttcttttaaattatttcagctttaaaaatacagaaatggaatctgtcaagagcaggtatttcatacggttaaaaaaatgaacatgcagactccttttcaatatgggtttatatatataagtattttttgtgtattatgactacgttaggagtttaatattgtcaaggacagtacaactgcaaagggatgctgtatagcagcacatcagaagtcggaaggaactgacacattctctcagagctcaaggtcttaaagagcttgagttaaatctaggtacagttacaggcatgtatagacttaaatggatgcaatggaagctaactaaaataaggcttagttgtcctttctatttaaataccccaagttgtcttcttacttcctctcccctctcccattttgcactgtgtgtcgatgcaatcttcgctagcacaaaatattgtcgctaatagtcatttctgttttcccattgtaaatgctgttgagctttattctattttatgttactttgttaatgaaatttaggaaagcagttgtttctttaaatttattgtgatattctatatctagcggcctttatatgcaaataaaattgcaagatttttaaaaaaaaaaaaaaaaaaaaaaaaaa

SEQ ID NO: 127 - DNA, 4541 bp, human
ggatcctctagggtcccagctcgcctcgatggagctcctcccgccgctgcctcagtccttcctgttgctgctgctgttgcctgccaagcccgcggcgggcgaggactggcagtgcccgcgcaccccctacgcggcctctcgcgactttgacgtgaagtacgtggtgcccagcttctccgccggaggcctggtacaggccatggtgacctacgagggcgacagaaatgagagtgctgtgtttgtagccatacgcaatcgcctgcatgtgcttgggcctgacctgaagtctgtccagagcctggccacgggccctgctggagaccctggctgccagacgtgtgcagcctgtggcccaggaccccacggccctcccggtgacacagacacaaaggtgctggtgctggatcccgcgctgcctgcgctggtcagttgtggctccagcctgcagggccgctgcttcctgcatgacctagagccccaagggacagccgtgcatctggcagcgccagcctgcctcttctcagcccaccataaccggcccgatgactgccccgactgtgtggccagcccattgggcacccgtgtaactgtggttgagcaaggccaggcctcctatttctacgtggcatcctcactggacgcagccgtggctggcagcttcagcccacgctcagtgtctatcaggcgtctcaaggctgacgcctcgggattcgcaccgggctttgtggcgttgtcagtgctgcccaagcatcttgtctcctacagtattgaatacgtgcacagcttccacacgggagccttcgtatacttcctgactgtacagccggccagcgtgacagatgatcctagtgccctgcacacacgcctggcacggcttagcgccactgagccagagttgggtgactatcgggagctggtcctcgactgcagatttgctccaaaacgcaggcgccggggggccccagaaggcggacagccctaccctgtgctgcaggtggcccactccgctccagtgggtgcccaacttgccactgagctgagcatcgccgagggccaggaagtactatttggggtctttgtgactggcaaggatggtggtcctggcgtgggccccaactctgtcgtctgtgccttccccattgacctgctggacacactaattgatgagggtgtggagcgctgttgtgaatccccagtccatccaggcctccggcgaggcctcgacttcttccagtcgcccagtttttgccccaacccgcctggcctggaagccctcagccccaacaccagctgccgccacttccctctgctggtcagtagcagcttctcacgtgtggacctattcaatgggctgttgggaccagtacaggtcactgcattgtatgtgacacgccttgacaacgtcacagtggcacacatgggcacaatggatgggcgtatcctgcaggtggagctggtcaggtcactaaactacttgctgtatgtgtccaacttctcactgggtgacagtgggcagcccgtgcagcgggatgtcagtcgtcttggggaccacctactctttgcctctggggaccaggttttccaggtacctatccgaggccctggctgccgccacttcctgacctgtgggcgttgcctaagggcatggcatttcatgggctgtggctggtgtgggaacatgtgcggccagcagaaggagtgtcctggctcctggcaacaggaccactgcccacctaagcttactgagttccacccccacagtggacctctaaggggcagtacaaggctgaccctgtgtggctccaacttctaccttcacccttctggtctggtgcctgagggaacccatcaggtcactgtgggccaaagtccctgccggccactgcccaaggacagctcaaaactcagaccagtgccccggaaagactttgtagaggagtttgagtgtgaactggagcccttgggcacccaggcagtggggcctaccaacgtcagcctcaccgtgactaacatgccaccgggcaagcacttccgggtagacggcacctccgtgctgagaggcttctctttcatggagccagtgctgatagcagtgcaacccctctttggcccacgggcaggaggcacctgtctcactcttgaaggccagagtctgtctgtaggcaccagccgggctgtgctggtcaatgggactgagtgtctgctagcacgggtcagtgaggggcagcttttatgtgccacaccccctggggccacggtggccagtgtcccccttagcctgcaggtggggggtgcccaggtacctggttcctggaccttccagtacagagaagaccctgtcgtgctaagcatcagccccaactgtggctacatcaactcccacatcaccatctgtggccagcatctaacttcagcatggcacttagtgctgtcattccatgacgggcttagggcagtggaaagcaggtgtgagaggcagcttccagagcagcagctgtgccgccttcctgaatatgtggtccgagacccccagggatgggtggcagggaatctgagtgcccgaggggatggagctgctggctttacactgcctggctttcgcttcctacccccaccccatccacccagtgccaacctagttccactgaagcctgaggagcatgccattaagtttgagtatattgggctgggcgctgtggctgactgtgtgggtatcaacgtgaccgtgggtggtgagagctgccagcacgagttccggggggacatggttgtctgccccctgcccccatccctgcagcttggccaggatggtgccccattgcaggtctgcgtagatggtgaatgtcatatcctgggtagagtggtgcggccagggccagatggggtcccacagagcacgctccttggtatcctgctgcctttgctgctgcttgtggctgcactggcgactgcactggtcttcagctactggtggcggaggaagcagctagttcttcctcccaacctgaatgacctggcatccctggaccagactgctggagccacacccctgcctattctgtactcgggctctgactacagaagtggccttgcactccctgccattgatggtctggattccaccacttgtgtccatggagcatccttctccgatagtgaagatgaatcctgtgtgccactgctgcggaaagagtccatccagctaagggacctggactctgcgctcttggctgaggtcaaggatgtgctgattccccatgagcgggtggtcacccacagtgaccgagtcattggcaaaggccactttggagttgtctaccacggagaatacatagaccaggcccagaatcgaatccaatgtgccatcaagtcactaagtcgcatcacagagatgcagcaggtggaggccttcctgcgagaggggctgctcatgcgtggcctgaaccacccgaatgtgctggctctcattggtatcatgttgccacctgagggcctgccccatgtgctgctgccctatatgtgccacggtgacctgctccagttcatccgctcacctcagcggaaccccaccgtgaaggacctcatcagctttggcctgcaggtagcccgcggcatggagtacctggcagagcagaagtttgtgcacagggacctggctgcgcggaactgcatgctggacgagtcattcacagtcaaggtggctgactttggtttggcccgcgacatcctggacagggagtactatagtgttcaacagcatcgccacgctcgcctacctgtgaagtggatggcgctggagagcctgcagacctatagatttaccaccaagtctgatgtgtggtcatttggtgtgctgctgtgggaactgctgacacggggtgccccaccataccgccacattgacccttttgaccttacccacttcctggcccagggtcggcgcctgccccagcctgagtattgccctgattctctgtaccaagtgatgcagcaatgctgggaggcagacccagcagtgcgacccaccttcagagtactagtgggggaggtggagcagatagtgtctgcactgcttggggaccattatgtgcagctgccagcaacctacatgaacttgggccccagcacctcgcatgagatgaatgtgcgtccagaacagccgcagttctcacccatgccagggaatgtacgccggccccggccactctcagagcctcctcggcccacttgacttagttcttgggctggacctgcttagctgccttgagctaaccccaaggctgcctctgggccatgccaggccagagcagtggccctccaccttgttcctgccctttaactttcagaggcaataggtaaatgggcccattaggtccctcactccacagagtgagccagtgagggcagtcctgcaacatgtatttatggagtgcctgctgtggaccctgtcttctgggcacagtggactcagcagtgaccacaccaacactgacccttgaaccaataaaggaacaaatgactattaaagcacaaaaaaaaaa

SEQ ID NO: 128 - DNA, 1186 bp, human
aggaatctgcgctcgggttccgcagatgcagaggttgaggtggctgcgggactggaagtcatcgggcagaggtctcacagcagccaaggaacctggggcccgctcctcccccctccaggccatgaggattctgcagttaatcctgcttgctctggcaacagggcttgtagggggagagaccaggatcatcaaggggttcgagtgcaagcctcactcccagccctggcaggcagccctgttcgagaagacgcggctactctgtggggcgacgctcatcgcccccagatggctcctgacagcagcccactgcctcaagccccgctacatagttcacctggggcagcacaacctccagaaggaggagggctgtgagcagacccggacagccactgagtccttcccccaccccggcttcaacaacagcctccccaacaaagaccaccgcaatgacatcatgctggtgaagatggcatcgccagtctccatcacctgggctgtgcgacccctcaccctctcctcacgctgtgtcactgctggcaccagctgcctcatttccggctggggcagcacgtccagcccccagttacgcctgcctcacaccttgcgatgcgccaacatcaccatcattgagcaccagaagtgtgagaacgcctaccccggcaacatcacagacaccatggtgtgtgccagcgtgcaggaagggggcaaggactcctgccagggtgactccgggggccctctggtctgtaaccagtctcttcaaggcattatctcctggggccaggatccgtgtgcgatcacccgaaagcctggtgtctacacgaaagtctgcaaatatgtggactggatccaggagacgatgaagaacaattagactggacccacccaccacagcccatcaccctccatttccacttggtgtttggttcctgttcactctgttaataagaaaccctaagccaagaccctctacgaacattctttgggcctcctggactacaggagatgctgtcacttaataatcaacctggggttcgaaatcagtgagacctggattcaaattctgccttgaaatattgtgactctgggaatgacaacacctggtttgttctctgttgtatccccagccccaaagacagctcctggccatatatcaaggtttcaataaatatttgctaaatgagtg

SEQ ID NO: 129 - DNA, 2304 bp, human
gtccccgcagcgccgtcgcgccctcctgccgcaggccaccgaggccgccgccgtctagcgccccgacctcgccaccatgagagccctgctggcgcgcctgcttctctgcgtcctggtcgtgagcgactccaaaggcagcaatgaacttcatcaagttccatcgaactgtgactgtctaaatggaggaacatgtgtgtccaacaagtacttctccaacattcactggtgcaactgcccaaagaaattcggagggcagcactgtgaaatagataagtcaaaaacctgctatgaggggaatggtcacttttaccgaggaaaggccagcactgacaccatgggccggccctgcctgccctggaactctgccactgtccttcagcaaacgtaccatgcccacagatctgatgctcttcagctgggcctggggaaacataattactgcaggaacccagacaaccggaggcgaccctggtgctatgtgcaggtgggcctaaagccgcttgtccaagagtgcatggtgcatgactgcgcagatggaaaaaagccctcctctcctccagaagaattaaaatttcagtgtggccaaaagactctgaggccccgctttaagattattgggggagaattcaccaccatcgagaaccagccctggtttgcggccatctacaggaggcaccgggggggctctgtcacctacgtgtgtggaggcagcctcatcagcccttgctgggtgatcagcgccacacactgcttcattgattacccaaagaaggaggactacatcgtctacctgggtcgctcaaggcttaactccaacacgcaaggggagatgaagtttgaggtggaaaacctcatcctacacaaggactacagcgctgacacgcttgctcaccacaacgacattgccttgctgaagatccgttccaaggagggcaggtgtgcgcagccatcccggactatacagaccatctgcctgccctcgatgtataacgatccccagtttggcacaagctgtgagatcactggctttggaaaagagaattctaccgactatctctatccggagcagctgaaaatgactgttgtgaagctgatttcccaccgggagtgtcagcagccccactactacggctctgaagtcaccaccaaaatgctatgtgctgctgacccccaatggaaaacagattcctgccagggagactcagggggacccctcgtctgttccctccaaggccgcatgactttgactggaattgtgagctggggccgtggatgtgccctgaaggacaagccaggcgtctacacgagagtctcacacttcttaccctggatccgcagtcacaccaaggaagagaatggcctggccctctgagggtccccagggaggaaacgggcaccacccgctttcttgctggttgtcatttttgcagtagagtcatctccatcagctgtaagaagagactgggaagataggctctgcacagatggatttgcctgtggcaccaccagggtgaacgacaatagctttaccctcacggataggcctgggtgctggctgcccagaccctctggccaggatggaggggtggtcctgactcaacatgttactgaccagcaacttgtctttttctggactgaagcctgcaggagttaaaaagggcagggcatctcctgtgcatgggctcgaagggagagccagctcccccgaccggtgggcatttgtgaggcccatggttgagaaatgaataatttcccaattaggaagtgtaagcagctgaggtctcttgagggagcttagccaatgtgggagcagcggtttggggagcagagacactaacgacttcagggcagggctctgatattccatgaatgtatcaggaaatatatatgtgtgtgtatgtttgcacacttgttgtgtgggctgtgagtgtaagtgtgagtaagagctggtgtctgattgttaagtctaaatatttccttaaactgtgtggactgtgatgccacacagagtggtctttctggagaggttataggtcactcctggggcctcttgggtcccccacgtgacagtgcctgggaatgtacttattctgcagcatgacctgtgaccagcactgtctcagtttcactttcacatagatgtccctttcttggccagttatcccttccttttagcctagttcatccaatcctcactgggtggggtgaggaccactccttacactgaatatttatatttcactatttttatttatatttttgtaattttaaataaaagtgatcaataaaatgtgatttttctga

SEQ ID NO: 130 - DNA, 2900 bp, human
atgagtgtcagaagtgtgaagggtgcctgttctgaatcccagagcctcctctccctctgtgaggctggcaggtgaggaagggtttaacctcactggaaggaatccctggagctagcggctgctgaaggcgtcgaggtgtgggggcacttggacagaacagtcaggcagccgggagctctgccagctttggtgaccttgggccgggctgggagcgctgcggcgggagccggaggactatgagctgccgcgcgttgtccagagcccagcccagccctacgcgcgcggcccggagctctgttccctggaactttgggcactgcctctgggacccctgccggccagcaggcaggatggtgcttgcctcgtgccccttggtgcccgtctgctgatgtgcccagcctgtgcccgccatgccgccctccatctcagctttccaggccgcctacatcggcatcgaggtgctcatcgccctggtctctgtgcccgggaacgtgctggtgatctgggcggtgaaggtgaaccaggcgctgcgggatgccaccttctgcttcatcgtgtcgctggcggtggctgatgtggccgtgggtgccctggtcatccccctcgccatcctcatcaacattgggccacagacctacttccacacctgcctcatggttgcctgtccggtcctcatcctcacccagagctccatcctggccctgctggcaattgctgtggaccgctacctccgggtcaagatccctctccggtacaagatggtggtgaccccccggagggcggcggtggccatagccggctgctggatcctctccttcgtggtgggactgacccctatgtttggctggaacaatctgagtgcggtggagcgggcctgggcagccaacggcagcatgggggagcccgtgatcaagtgcgagttcgagaaggtcatcagcatggagtacatggtctacttcaacttctttgtgtgggtgctgcccccgcttctcctcatggtcctcatctacctggaggtcttctacctaatccgcaagcagctcaacaagaaggtgtcggcctcctccggcgacccgcagaagtactatgggaaggagctgaagatcgccaagtcgctggccctcatcctcttcctctttgccctcagctggctgcctttgcacatcctcaactgcatcaccctcttctgcccgtcctgccacaagcccagcatccttacctacattgccatcttcctcacgcacggcaactcggccatgaaccccattgtctatgccttccgcatccagaagttccgcgtcaccttccttaagatttggaatgaccatttccgctgccagcctgcacctcccattgacgaggatctcccagaagagaggcctgatgactagaccccgccttccgctcccaccagcccacatccagtggggtctcagtccagtcctcacatgcccgctgtcccaggggtctccctgagcctgccccagctgggctgttggctgggggcatgggggaggctctgaagagatacccacagagtgtggtccctccactaggagttaactaccctacacctctgggccctgcaggaggcctgggagggcaagggtcctacggagggaccaggtgtctagaggcaacagtgttctgagcccccacctgcctgaccatcccatgagcagtccagcgcttcagggctgggcaggtcctggggaggctgagactgcagaggagccacctgggctgggagaaggtgcttgggcttctgcggtgaggcaggggagtctgcttgtcttagatgttggtggtgcagccccaggaccaagcttaaggagaggagagcatctgctctgagacggatggaaggagagaggttgaggatgcactggcctgttctgtaggagagactggccagaggcagctaaggggcaggaatcaaggagcctccgttcccacctctgaggactctggaccccaggccataccaggtgctagggtgcctgctctccttgccctgggccagcccaggattgtacgtgggagaggcagaaagggtaggttcagtaatcatttctgatgatttgctggagtgctggctccacgccctggggagtgagcttggtgcggtaggtgctggcctcaaacagccacgaggtggtagctctgagccctccttcttgccctgagctttccggggaggagcctggagtgtaattacctgtcatctgggccaccagctccactggcccccgttgccgggcctggactgtcctaggtgaccccatctctgctgcttctgggcctgatggagaggagaacactagacatgccaactcgggagcattctgcctgcctgggaacggggtggacgagggagtgtctgtaaggactcagtgttgactgtaggcgcccctggggtgggtttagcaggctgcagcaggcagaggaggagtacccccctgagagcatgtgggggaaggccttgctgtcatgtgaatccctcaatacccctagtatctggctgggttttcaggggctttggaagctctgttgcaggtgtccgggggtctaggactttagggatctgggatctggggaaggaccaacccatgccctgccaagcctggagcccctgtgttggggggcaaggtgggggagcctggagcccctgtgtgggagggcgaggcgggggagcctggagcccctgtgtgggagggcgaggcgggggatcctggagcccctgtgtcggggggcgagggaggggaggtggccgtcggttgaccttctgaacatgagtgtcaactccaggacttgcttccaagcccttccctctgttggaaattgggtgtgccctggctcccaagggaggcccatgtgactaataaaaaactgtgaaccct

SEQ ID NO: 131 - DNA, 15359 bp, human
tctacctcgcgggtgcctctggtgtctccagaggtctccgaccccagcccgcccccagccctcccgcccagcccgcagccccctccctctgttccccgacctcagaccctgggcttccgacctcgacatcatgggtgacgcagaaggcgaagacgaggtccagttcctgcggacggacgatgaggtggtcctgcagtgcagcgctaccgtgctcaaggagcagctcaagctctgcctggccgccgagggcttcggcaaccgcctgtgcttcctggagcccactagcaacgcgcagaatgtgccccccgatctggccatctgttgcttcgtcctggagcagtccctgtctgtgcgagccctgcaggagatgctggctaacacggtggaggctggcgtggagtcatcccagggcgggggacacaggacgctcctgtatggccatgccatcctgctccggcatgcacacagccgcatgtatctgagctgcctcaccacctcccgctccatgactgacaagctggccttcgatgtgggactgcaggaggacgcaacaggagaggcttgctggtggaccatgcacccagcctccaagcagaggtctgaaggagaaaaggtccgcgttggggatgacatcatccttgtcagtgtctcctccgagcgctacctgcacctgtcgaccgccagtggggagctccaggttgacgcttccttcatgcagacactgtggaacatgaaccccatctgctcccgctgcgaagagggcttcgtgacgggaggtcacgtcctccgcctctttcatggacatatggatgagtgtctgaccatttcccctgctgacagtgatgaccagcgcagacttgtctactatgaggggggagctgtgtgcactcatgcccgctccctctggaggctggagccactgagaatcagctggagtgggagccacctgcgctggggccagccactccgagtccggcatgtcactaccgggcagtacctagcgctcaccgaggaccagggcctggtggtggttgacgccagcaaggctcacaccaaggctacctccttctgcttccgcatctccaaggagaagctggatgtggcccccaagcgggatgtggagggcatgggcccccctgagatcaagtacggggagtcactgtgcttcgtgcagcatgtggcctcaggactgtggctcacctatgccgctccagaccccaaggccctgcggctcggcgtgctcaagaagaaggccatgctgcaccaggagggccacatggacgacgcactgtcgctgacccgctgccagcaggaggagtcccaggccgcccgcatgatccacagcaccaatggcctatacaaccagttcatcaagagcctggacagcttcagcgggaagccacggggctcggggccacccgctggcacggcgctgcccatcgagggcgttatcctgagcctgcaggacctcatcatctacttcgagcctccctccgaggacttgcagcacgaggagaagcagagcaagctgcgaagcctgcgcaaccgccagagcctcttccaggaggaggggatgctctccatggtcctgaattgcatagaccgcctaaatgtctacaccactgctgcccactttgctgagtttgcaggggaggaggcagccgagtcctggaaagagattgtgaatcttctctatgaactcctagcttctctaatccgtggcaatcgtagcaactgtgccctcttctccacaaacttggactggctggtcagcaagctggatcggctggaggcctcgtctggcatcctggaggtcctgtactgtgtcctcattgagagtccagaggttctgaacatcatccaggagaatcacatcaagtccatcatctccctcctggacaagcatgggaggaaccacaaggtcctggacgtgctatgctccctgtgtgtgtgtaatggtgtggctgtacgctccaaccaagatcttattactgagaacttgctgcctggccgtgagcttctgctgcagacaaacctcatcaactatgtcaccagcatccgccccaacatctttgtgggccgagcggaaggcaccacgcagtacagcaaatggtactttgaggtgatggtggacgaggtgactccatttctgacagctcaggccacccacttgcgggtgggctgggccctcaccgagggctacaccccctaccctggggccggcgagggctggggcggcaacggggtcggcgatgacctctattcctacggctttgatggactgcatctctggacaggacacgtggcacgcccagtgacttccccagggcagcacctcctggcccctgaagacgtgatcagctgctgcctggacctcagcgtgccgtccatctccttccgcatcaacggctgccctgtgcagggtgtctttgagtccttcaacctggacgggctcttcttccctgttgtcagcttctcggctggtgtcaaggtgcggttcctccttggtggccgccatggtgaattcaagttcctgcccccacctggctatgctccatgccatgaggctgtgctccctcgagagcgactccatcttgaacccatcaaggagtatcgacgggaggggccccgggggcctcacctggtgggccccagtcgctgcctctcacacaccgacttcgtgccctgccctgtggacactgtccagattgtcctgccgccccatctggagcgcattcgggagaagctggcggagaacatccacgagctctgggcgctaacccgcatcgagcagggctggacctacggcccggttcgggatgacaacaagaggctgcacccgtgtcttgtggacttccacagccttccagagcctgagaggaactacaacctgcagatgtctggggagacgctcaagactctgctggctctgggctgccacgtgggcatggcggatgagaaggcggaggacaacctgaagaagacaaaactccccaagacgtatatgatgagcaatgggtacaagccggctccgctggacctgagccacgtgcggctgacgccggcgcagacaacactggtggaccgtctggcagaaaatgggcacaacgtgtgggcccgagaccgcgtgggccagggctggagctacagcgcagtgcaggacatcccagcgcgccgaaaccctcggctggtgccctaccgcctgctggatgaagccaccaagcgcagcaaccgggacagcctctgccaggccgtgcgcaccctcctgggctacggctacaacatcgagcctcctgaccaggagcccagtcaggtggagaaccagtctcgttgtgaccgggtgcgcatcttccgggcagagaaatcctatacagtgcagagcggccgctggtacttcgagtttgaagcagtcaccacaggcgagatgcgcgtgggctgggcgaggcccgagctgaggcctgatgtagagctgggagctgacgagctggcctatgtcttcaatgggcaccgcggccagcgctggcacttgggcagtgaaccatttgggcgcccctggcagccgggcgatgtcgttggctgtatgatcgacctcacagagaacaccattatcttcaccctcaatggcgaggtcctcatgtctgactcaggctccgaaacagccttccgggagattgagattggggacggcttcctgcccgtctgcagcttgggacctggccaggtgggtcatctgaacctgggccaggacgtgagctctctgaggttctttgccatctgtggcctccaggaaggcttcgagccatttgccatcaacatgcagcgcccagtcaccacctggttcagcaaaggcctgccccagtttgagccagtgccccttgaacaccctcactatgaggtatcccgagtggacggcactgtggacacgcccccctgcctgcgcctgacccaccgcacctggggctcccagaacagcctggtggagatgcttttcctgcggctgagcctcccagtccagttccaccagcacttccgctgcactgcaggggccaccccgctggcacctcctggcctgcagccccccgccgaggacgaggcccgggcggcggaacccgaccctgactacgaaaacctgcgccgctcagctgggggctggagcgaggcagagaacggcaaagaagggactgcgaaggagggcgcccccgggggcaccccgcaggcggggggagaggcgcagcccgccagggcggagaatgagaaggatgccaccaccgagaagaacaagaagagaggcttcttattcaaggccaagaaggtcgccatgatgacccagccaccggccacccccacgctgccccgactccctcacgacgtggtgcctgcagacaaccgcgatgaccccgagatcatcctcaacaccaccacgtactattactccgtgagggtctttgctggacaggagcccagctgcgtgtgggcgggctgggtcacccctgactaccatcagcacgacatgagcttcgacctcagcaaggtccgggtcgtgacggtgaccatgggggatgaacaaggcaacgtccacagcagcctcaagtgtagcaactgctacatggtgtggggcggagactttgtgagtcccgggcagcagggccggatcagccacacggaccttgtcattgggtgcctggtggacttggccactggcttaatgacctttacagccaatggcaaagagagcaacacctttttccaggtggaacccaacactaagctatttcctgccgtcttcgtcctgcccacccaccagaacgtcatccagtttgagctggggaagcagaagaacatcatgccgttgtcagccgccatgttccaaagcgagcgcaagaacccggccccgcagtgcccaccgcggctggagatgcagatgctgatgccagtgtcctggagccgcatgcccaaccacttcctgcaggtggagacgaggcgtgccggcgagcggctgggctgggccgtgcagtgccaggagccgctgaccatgatggcgctgcacatccccgaggagaaccggtgcatggacatcctggagctgtcggagcgcctggacctgcagcgcttccactcgcacaccctgcgcctctaccgcgctgtgtgcgccctgggcaacaatcgcgtggcgcacgctctgtgcagccacgtagaccaagctcagctgctgcacgccctggaggacgcgcacctgccaggcccactgcgcgcaggctactatgacctcctcatcagcatccacctcgaaagtgcctgccgcagccgccgctccatgctctctgaatacatcgtgcccctcacgcctgagacccgcgccatcacgctcttccctcctggaaggagcacagaaaatggtcacccccggcatggcctgccgggagttggagtcaccacttcgctgaggcccccgcatcatttctcgcccccctgtttcgtggccgctctgccagctgctggggcagcagaggccccggcccgcctcagccctgccatcccgctggaggccctgcgggacaaggcactgaggatgctgggggaggcggtgcgcgacggtgggcagcacgctcgcgaccccgtcggggcctccgtggagttccagtttgtgcctgtgctcaagctcgtgtccaccctgctggtgatgggcatctttggcgatgaggatgtgaaacagatcttgaagatgattgagcctgaggtcttcactgaggaagaggaggaggaggacgaggaggaagagggtgaagaggaagatgaggaggagaaggaggaggatgaggaggaaacagcacaggaaaaggaagatgaggaaaaagaggaagaggaggcagcagaaggggagaaagaagaaggcttggaggaagggctgctccagatgaagttgccagagtctgtgaagttacagatgtgccacctgctggagtatttctgtgaccaagagctgcagcaccgtgtggagtccctggcagcctttgcggagcgctatgtggacaagctccaggccaaccagcggagccgctatggcctcctcataaaagccttcagcatgaccgcagcagagactgcaagacgtacccgtgagttccgctccccaccccaggaacagatcaatatgctattgcaattcaaagatggtacagatgaggaagactgtcctctccctgaagagattcgacaggatttgcttgactttcatcaagacctgctggcacactgtggaattcagctagatggagaggaggaggaaccagaggaagagaccaccctgggcagccgcctcatgagcctgttggagaaagtgcggctggtgaagaagaaggaagagaaacctgaggaggagcggtcagcagaggagagcaaaccccggtccctgcaggagctggtgtcccacatggtggtgcgctgggcccaagaggacttcgtgcagagccccgagctggtgcgggccatgttcagcctcctgcaccggcagtacgacgggctgggtgagctgctgcgtgccctgccgcgggcgtacaccatctcaccgtcctccgtggaagacaccatgagcctgctcgagtgcctcggccagatccgctcgctgctcatcgtgcagatgggcccccaggaggagaacctcatgatccagagcatcgggaacatcatgaacaacaaagtcttctaccaacacccgaacctgatgagggcgctgggcatgcacgagacggtcatggaggtcatggtcaacgtcctcgggggcggcgagtccaaggagatccgcttccccaagatggtgacaagctgctgccgcttcctctgctatttctgccgaatcagccggcagaaccagcgctccatgtttgaccacctgagctacctgctggagaacagtggcatcggcctgggcatgcagggctccacgcccctggacgtggctgctgcctccgtcattgacaacaatgagctggccttggcattgcaggagcaggacctggaaaaggttgtgtcctacctggcaggctgtggcctccagagctgccccatgcttgtggccaaagggtacccagacattggctggaacccctgtggtggagagcgctacctggacttcctgcgctttgctgtcttcgtcaacggcgagagcgtggaggagaacgccaatgtggtggtgcggctgctcatccggaagcctgagtgcttcggacccgccctgcggggtgagggtggctcagggctgctggctgccatcgaagaggccatccgcatctccgaggaccctgcgagggatggcccaggcatccgcagggaccggcggcgcgagcactttggtgaggaaccgcctgaagaaaaccgggtgcacctgggacacgccatcatgtccttctatgccgccttgatcgacctgctcggacgctgtgcaccagagatgcatctaatccaagccggcaagggtgaggccctgcggatccgcgccatcctccgctcccttgtgcccttggaggaccttgtgggcatcatcagcctcccactgcagattcccaccctgggcaaagatggggctctggtgcagccaaagatgtcagcatccttcgtgccggaccacaaggcgtccatggtgctcttcctggaccgtgtgtatggcatcgagaaccaggacttcttgctgcacgtgctggacgtggggttcctgcccgacatgagggcagccgcctcgctggacacggccactttcagcaccaccgagatggcgctggccgtgaaccgctacctgtgcctggccgtgctgccgctcatcaccaagtgtgcgccgctctttgcgggcacagaacaccgcgccatcatggtggactctatgctgcataccgtgtaccgcctgtctcggggtcgttcgctcaccaaggcgcagcgtgacgtcatcgaggactgcctcatgtcgctctgcaggtacatccgcccgtcgatgctgcagcacctgttgcgccgcctggtgttcgacgtgcccatcctcaacgagttcgccaagatgccactcaagctcctcaccaaccactatgagcgctgttggaagtactactgcctacccacgggctgggccaacttcggggtcacctcagaggaggagctgcacctcacacggaaactcttctggggcatctttgactctctggcccataagaaatacgacccggagctgtaccgcatggccatgccttgtctgtgcgccattgccggggctctgccccccgactatgtggatgcctcatactcatctaaggcagagaaaaaggccacagtggatgctgaaggcaactttgatccccggcctgtggagaccctcaatgtgatcatcccggagaagctggactccttcattaacaagtttgcggagtacacacacgagaagtgggccttcgacaagatccagaacaactggtcctatggagagaacatagacgaggagctgaagacccaccccatgctgaggccctacaagaccttttcagagaaggacaaagagatttaccgctggcccatcaaggagtccctgaaggccatgattgcctgggaatggacgatagagaaggccagggagggtgaggaggagaagacggaaaagaaaaaaacgcggaagatatcacaaagtgcccagacctatgatcctcgagaaggctacaaccctcagccccccgaccttagtgctgttaccctgtcccgggagctgcaggccatggcagaacaactggcagaaaattaccacaacacgtggggacggaagaagaagcaggagctggaagccaaaggcggtgggacccaccccctgctggtcccctacgacacgctcacggccaaggagaaggcacgagatcgagagaaggcccaggagctactgaaattcctgcagatgaatggctacgcggttacaagaggccttaaggacatggaactggactcgtcttccattgaaaagcggtttgcctttggcttcctgcagcagctgctgcgctggatggacatttctcaggagttcattgcccacctggaggctgtggtcagcagtgggcgagtggaaaagtccccacatgaacaggagattaaattctttgccaagatcctgctccctttgatcaaccagtacttcaccaaccactgcctctatttcttgtccactccggctaaagtgctgggcagcggtggccacgcctctaacaaggagaaggaaatgatcaccagcctcttctgcaaacttgctgctctcgtccgccaccgagtctctctctttgggacagacgccccagctgtggtcaactgtcttcacatcctggcccgctccctggatgccaggacagtgatgaagtcaggccctgagatcgtgaaggctggcctccgctccttcttcgagagtgcctcggaggacatcgagaagatggtggagaacctgcggctgggcaaggtgtcgcaggcgcgcacccaggtgaaaggcgtgggccagaacctcacctacaccactgtggcactgctgccggtcctcaccaccctcttccagcacatcgcccagcaccagttcggagatgacgtcatcctggacgacgtccaggtctcttgctaccgaacgctgtgcagtatctactccctgggaaccaccaagaacacttatgtggaaaagcttcggccagccctcggggagtgcctggcccgtctggcagcagccatgccggtggcgttcctggagccgcagctgaacgagtacaacgcctgctccgtgtacaccaccaagtctccgcgggagcgggccatcctggggctccccaacagtgtggaggagatgtgtcccgacatcccggtgctggagcggctcatggcagacattggggggctggccgagtcaggtgcccgctacacagagatgccgcatgtcatcgagatcacgctgcccatgctatgcagctacctgccccgatggtgggagcgcgggcccgaggcacccccttccgccctgcccgccggcgcccccccaccctgcacagctgtcacctctgaccacctcaactccctgctggggaatatcctgagaatcatcgtcaacaacctgggcattgacgaggcctcctggatgaagcggctggctgtgttcgcacagcccattgtgagccgtgcacggccggagctcctgcagtcccacttcatcccaactatcgggcggctgcgcaagagggcagggaaggtggtgtccgaggaggagcagctgcgcctggaggccaaggcggaggcccaggagggcgagctgctggtgcgggacgagttctctgtgctctgccgggacctctacgccctgtatccgctgctcatccgctacgtggacaacaacagggcgcagtggctgacggagccgaatcccagcgcggaggagctgttcaggatggtgggcgagatcttcatctactggtccaagtcccacaacttcaagcgcgaggagcagaactttgtggtccagaatgagatcaacaacatgtccttcctgactgctgacaacaaaagcaaaatggctaaggcgggagatatacagtccggtggctcggaccaggaacgcaccaagaagaagcgccggggggaccggtactctgtgcagacgtcactgatcgtggccacactgaagaagatgctgcccatcggcctgaatatgtgtgcgcccaccgaccaagacctcatcacgctggccaagacccgttacgccctgaaagacacagatgaggaggtccgggaatttctgcacaacaaccttcaccttcagggaaaggtcgaaggctccccgtctctgcgctggcagatggctctgtaccggggcgtcccgggtcgcgaggaggacgccgatgaccccgagaaaatcgtgcgcagagtccaggaagtgtcagccgtgctctactacctggaccagaccgagcacccttacaagtctaagaaggccgtgtggcacaagcttttgtccaaacagcgccggcgggcagtcgtggcctgtttccgtatgacgcccctgtacaacctgcccacgcaccgggcatgtaacatgttcctggagagctacaaggctgcatggatcctgactgaagaccacagttttgaggaccgcatgatagatgacctttcaaaagctggggagcaggaggaggaggaggaagaggtggaagagaagaagccagaccccctgcaccagttggtcctgcacttcagccgcactgccctgacggaaaagagcaaactggatgaggattacctgtacatggcctatgctgatatcatggcaaagagctgccacctggaggagggaggggagaacggtgaagctgaagaggaggttgaggtctcctttgaggagaaacagatggagaagcagaggctcttgtaccagcaagcacggctgcacacccggggggcggccgagatggtgctgcagatgatcagtgcctgcaaaggagagacaggtgccatggtgtcctccaccctgaagctgggcatctccatcctcaatggaggcaatgctgaggtccagcagaaaatgctggattatcttaaggacaagaaggaagttggcttcttccagagtatccaggcactgatgcaaacatgcagcgtcctggatctcaatgcctttgagagacaaaacaaggccgaggggctgggcatggtgaatgaggatggcactgtcatcaatcgccagaacggagagaaggtcatggcggatgatgaattcacacaagacctgttccgattcctacaattgctctgtgaggggcacaataatgatttccagaactacctacggacacagacagggaacacgaccactattaacatcatcatttgcactgtggactacctcctgcggctgcaggaatccatcagcgacttctactggtactactcgggcaaggatgtcattgaagagcagggcaagaggaacttctccaaagccatgtcggtggctaagcaggtgttcaacagcctcactgagtacatccagggtccctgcaccgggaaccagcagagcctggcgcacagtcgcctatgggacgcagtggtgggattcctgcacgtgttcgcccacatgatgatgaagctcgctcaggactcaagccagatcgagctgctgaaggagctgctggatctgcagaaggacatggtggtgatgttgctgtcgctactagaagggaacgtggtgaacggcatgatcgcccggcagatggtggacatgctcgtggaatcctcatccaatgtggagatgatcctcaagttcttcgacatgttcctgaaactcaaggacattgtgggctctgaagccttccaggactacgtaacggatccccgtggcctcatctccaagaaggacttccagaaggccatggacagccagaagcagttcagcggtccagaaatccagttcctgctttcgtgctccgaagcggatgagaacgaaatgatcaactgcgaagagttcgccaaccgcttccaggagccagcacgcgacatcggcttcaacgtggcggtgctgctgaccaacctgtcggagcatgtgccgcatgaccctcgcctgcacaacttcctggagctggccgagagcatccttgagtacttccgcccctacctgggccgcatcgagatcatgggcgcgtcacgccgcatcgagcgcatctacttcgagatctcagagaccaaccgcgcccagtgggagatgccccaggtgaaggagtccaagcgccagttcatcttcgacgtggtgaacgagggcggcgaggctgagaagatggagctcttcgtgagtttctgcgaggacaccatcttcgagatgcagatcgccgcgcagatctcggagcccgagggcgagccggagaccgacgaggacgagggcgcgggcgcggcggaggcgggcgcggaaggcgcggaggagggcgcggcggggctcgagggcacggcggccacggcggcggcgggggcgacggcgcgggttgtggcggccgcaggccgggccctgcgaggcctcagctaccgcagcctgcggcggcgcgtgcggcggctgcggcggcttacggcccgcgaggcggccaccgcagtggcggcgctgctctgggcagcagtgacgcgcgctggggccgctggcgcgggggcggcggcgggcgcgctgggcctgctctggggctcgctgttcggcggcggcctggtggagggcgccaagaaggtgacggtgaccgagctcctggcaggcatgcccgaccccaccagcgacgaggtgcacggcgagcagccggccgggccgggcggagacgcagacggcgagggtgccagcgagggcgctggagacgccgcggagggcgctggagacgaggaggaggcggtgcacgaggccgggccgggcggtgccgacggggcggtggccgtgaccgatgggggccccttccggcccgaaggggctggcggtctcggggacatgggggacacgacgcctgcggaaccgcccacacccgagggctctcccatcctcaagaggaaattgggggtggatggagtggaggaggagctcccgccagagccagagcccgagccggaaccagagctggagccggagaaagccgatgccgagaatggggagaaggaagaagttcccgagcccacaccagagccccccaagaagcaagcacctccctcaccccctccaaagaaggaggaagctggaggcgaattctggggagaactggaggtgcagagggtgaagttcctgaactacctgtcccggaacttttacaccctgcggttccttgccctcttcttggcatttgccatcaacttcatcttgctgttttataaggtctcagactctccaccaggggaggacgacatggaaggctcagctgctggggatgtgtcaggtgcaggctctggtggcagctctggctggggcttgggggccggagaggaggcagagggcgatgaggatgagaacatggtgtactacttcctggaggaaagcacaggctacatggaacccgccctgcggtgtctgagcctcctgcatacactggtggcctttctctgcatcattggctataattgtctcaaggtgcccctggtaatctttaagcgggagaaggagctggcccggaagctggagtttgatggcctgtacatcacggagcagcctgaggacgatgacgtgaaggggcagtgggaccgactggtgctcaacacgccgtctttccctagcaactactgggacaagtttgtcaagcgcaaggtcctggacaaacatggggacatctacgggcgggagcggattgctgagctactgggcatggacctggccacactagagatcacagcccacaatgagcgcaagcccaacccgccgccagggctgctgacctggctcatgtccatcgatgtcaagtaccagatctggaagttcggggtcatcttcacagacaactccttcctgtacctgggctggtatatggtgatgtccctcttgggacactacaacaacttcttctttgctgcccatctcctggacatcgccatgggggtcaagacgctgcgcaccatcctgtcctctgtcacccacaatgggaaacagctggtgatgaccgtgggccttctggcggtggtcgtctacctgtacaccgtggtggccttcaacttcttccgcaagttctacaacaagagcgaggatgaggatgaacctgacatgaagtgtgatgacatgatgacgtgttacctgtttcacatgtacgtgggtgtccgggctggcggaggcattggggacgagatcgaggaccccgcgggtgacgaatacgagctctacagggtggtcttcgacatcaccttcttcttcttcgtcatcgtcatcctgttggccatcatccagggtctgatcatcgacgcttttggtgagctccgagaccaacaagagcaagtgaaggaggatatggagaccaagtgcttcatctgtggaatcggcagtgactactttgatacgacaccgcatggcttcgagactcacacgctggaggagcacaacctggccaattacatgtttttcctgatgtatttgataaacaaggatgagacagaacacacgggtcaggagtcttatgtctggaagatgtaccaagagagatgttgggatttcttcccagctggtgattgtttccgtaagcagtatgaggaccagcttagctgacacacccccagctggccctccacccccacctcaagtgccttattctcacagcaagccccttagtccccaagcccctccccctaaggcagctgggggagaggtgacctagtac

SEQ ID NO: 132 - DNA, 546 bp, human
ataaaacacagtatttattgatttcaaggaaactgtcttgaggatgttctatcagcgcatccacccaagtccctgggagcagggtctgaaaggctggcaccagcctgagcacagttgtggggaggaagatgggagcaccactgcctgaggctgagggagtaggatttggggaaagagggcttccactgagccaagtgatgacctgggggacctctgggtatctccagaagctctagtcaggttcattctcagccctccagacctgctgctgctggaagacctcctctccactgcaggaatctgggcggctcctctggagggagtagagatgccttaggtctgctgaggctagcccagggcgagcatcactttttgtctggcctccagacctctgtgctgctgttgtgtctgcttgggaggacttctcacctctcttacacattatgtcctcagggaagcctctcctgatcatcccttcctgggttgatcccttcctggttgaagccctgctagcagtgccctaagtggccccttgcaggcagcgta

SEQ ID NO: 133 - DNA, 2408 bp, human
acacagttagaggtcccgggcgcacctgcagagccggaggcgtgctggggcatgcgctccatgaaggctctgcagaaggccctgagccgggctggcagtcactgcgggcgaggaggctggggtcacccgagccggagccccctccttggcgggggcgtccggcaccacctcagtgaggccgcggcgcagggcagagagacgccacacagccaccagccgcagcaccaggatcatgattcatcagaaagtggcatgctgtcccgcctgggtgatttgctcttttacactattgctgaaggacaggaacgaacccctatccacaagttcaccactgcactaaaggccactggactgcagacatcagatcctcggctccgagactgcatgagcgagatgcaccgcgtggtccaagagtccagtagtggtggcctcttggaccgagatctcttccgaaagtgtgtgagcagcagcattgtgctcctgacccaggcattccgaaagaagtttgtcattcctgattttgaggagttcacgggccatgtggatcgcatctttgaggatgtcaaagagctcactggaggcaaagtggcagcctacatccctcagctggccaagtcaaacccagacctgtggggtgtctccctgtgcactgtggatggtcaacggcactctgtgggccacacaaagatccccttctgcctgcagtcctgtgtgaagcccctcacctatgccatctccataagcaccctaggcactgactacgtgcacaagtttgtgggcaaagagccaagtggcctgcgctacaacaagctctccctcgatgaggaaggaatcccccataaccccatggtcaatgctggtgccattgttgtcagctccctgatcaagatggactgtaacaaagcagagaagtttgattttgtgttgcagtatctcaacaaaatggctgggaatgaatacatgggtttcagcaatgccacattccagtcagagaaggaaacaggggatcggaattatgccatcggctattatcacgaggaaaagaagtgctttcctaagggggtggacatgatggctgcccttgatctctacttccagctgtgttctgtggaggtcacttgtgaatcaggcagtgtcatggcagccaccctcgccaacggtgggatttgccccatcacaggcgagagtgtgctgagtgctgaagcagtgcgcaacaccctcagcctcatgcattcctgcggcatgtatgacttctctggccagtttgccttccacgtgggcctgccagccaagtcagctgtatcaggagccatcctcctggtggtacccaatgtcatgggaatgatgtgcctgtcacccccattggacaagctggggaacagccatagggggaccagcttctgccagaagttggtgtctctcttcaatttccacaactatgacaacctgaggcactgtgctcggaagttagacccacggcgtgaaggggcagaaattcggaacaagactgtggtcaacctgttatttgctgcctatagtggcgatgtctcagctcttcgaaggtttgccttgtcagccatggatatggaacagaaagactatgactcgcgcacagctctgcatgttgctgcagctgaaggacacatcgaagttgttaaattcctgatcgaggcttgcaaagtgaatccttttgccaaggacaggtggggcaacattcccctggatgatgctgtgcagttcaaccatctggaggtggtcaaactgcttcaagattaccaggactcctacacactctctgaaactcaggctgaggcagcagctgaggccctgtccaaagagaacttagaaagcatggtatgagcacaggtcatggacagcccctgctcaagaaaaagcatgagctggccacacatgtaatccataaccaccaaaaatactatggagagctacactgcttcagtggggaccaagcagtcatttggtgacttaggctagtgctttctatgggagtcaaaataccccattccctcagcagacagagtacagagaagggcctcagaggacacctgcagtacagctatccagagagactgggcttcaaggtacagcctaatggcttgccccactcaaaaccatcccagctcttcacccaggtctcctcttcctctccctgaagaaaccatcatgagagagatactctggtggagggactctagctaccatgcacatgtacatatccacagaatatgggaagtgggaatggctatatacatggctttagtagtctggagaaatctactccccttggccaggacatgctgctgctactgctaacagccaattttatagacagagaaagtattttgtgttcaaataaactttaattaccaaaaaaaaaaaaaaaaaaa

SEQ ID NO: 134 - DNA, 1991 bp, human
cgcggcggctggcgtcgggaaagtacagtaaaaagtccgagtgcagccgccgggcgcaggatgggatccggctcctccagctaccggcccaaggccatctacctggacatcgatggacgcattcagaaggtaatcttcagcaagtactgcaactccagcgacatcatggacctgttctgcatcgccaccggcctgcctcggaacacgaccatctccctgctgaccaccgacgacgccatggtctccatcgaccccaccatgcccgcgaattcagaacgcactccgtacaaagtgagacctgtggccatcaagcaactctccgctggtgtcgaggacaagagaaccacaagccgtggccagtctgctgagagaccactgagggacagacgggttgtgggcctggagcagccccggagggaaggagcatttgaaagtggacaggtagagcccaggcccagagagccccagggctgctaccaggaaggccagcgcatccctccagagagagaagaattaatccagagcgtgctggcgcaggttgcagagcagttctcaagagcattcaaaatcaatgaactgaaagctgaagttgcaaatcacttggctgtcctagagaaacgcgtggaattggaaggactaaaagtggtggagattgagaaatgcaagagtgacattaagaagatgagggaggagctggcggccagaagcagcaggaccaactgcccctgtaagtacagttttttggataaccacaagaagttgactcctcgacgcgatgttcccacttaccccaagtacctgctctctccagagaccatcgaggccctgcggaagccgacctttgacgtctggctttgggagcccaatgagatgctgagctgcctggagcacatgtaccacgacctcgggctggtcagggacttcagcatcaaccctgtcaccctcaggaggtggctgttctgtgtccacgacaactacagaaacaaccccttccacaacttccggcactgcttctgcgtggcccagatgatgtacagcatggtctggctctgcagtctccaggagaagttctcacaaacggatatcctgatcctaatgacagcggccatctgccacgatctggaccatcccggctacaacaacacgtaccagatcaatgcccgcacagagctggcggtccgctacaatgacatctcaccgctggagaaccaccactgcgccgtggccttccagatcctcgccgagcctgagtgcaacatcttctccaacatcccacctgatgggttcaagcagatccgacagggaatgatcacattaatcttggccactgacatggcaagacatgcagaaattatggattctttcaaagagaaaatggagaattttgactacagcaacgaggagcacatgaccctgctgaagatgattttgataaaatgctgtgatatctctaacgaggtccgtccaatggaagtcgcagagccttgggtggactgtttattagaggaatattttatgcagagcgaccgtgagaagtcagaaggccttcctgtggcaccgttcatggaccgagacaaagtgaccaaggccacagcccagattgggttcatcaagtttgtcctgatcccaatgtttgaaacagtgaccaagctcttccccatggttgaggagatcatgctgcagccactttgggaatcccgagatcgctacgaggagctgaagcggatagatgacgccatgaaagagttacagaagaagactgacagcttgacgtctggggccaccgagaagtccagagagagaagcagagatgtgaaaaacagtgaaggagactgtgcctgaggaaagcggggggcgtggctgcagttctggacgggctggccgagctgcgcgggatccttgtgcagggaagagctgccctgggcacctggcaccacaagaccatgttttctaagaaccattttgttcactgatacaaaaaaaaaaaaaaa

SEQ ID NO: 135 - DNA, 2219 bp, human
agccagaaggatggggtggctcccactcctgctgcttctgactcaatgcttaggggtccctgggcagcgctcgccattgaatgacttccaagtgctccggggcacagagctacagcacctgctacatgcggtggtgcccgggccttggcaggaggatgtggcagatgctgaagagtgtgctggtcgctgtgggcccttaatggactgccgggccttccactacaacgtgagcagccatggttgccaactgctgccatggactcaacactcgccccacacgaggctgcggcgttctgggcgctgtgacctcttccagaagaaagactacgtacggacctgcatcatgaacaatggggttgggtaccggggcaccatggccacgaccgtgggtggcctgccctgccaggcttggagccacaagttcccgaatgatcacaagtacacgcccactctccggaatggcctggaagagaacttctgccgtaaccctgatggcgaccccggaggtccttggtgctacacaacagaccctgctgtgcgcttccagagctgcggcatcaaatcctgccgggaggccgcgtgtgtctggtgcaatggcgaggaataccgcggcgcggtagaccgcacggagtcagggcgcgagtgccagcgctgggatcttcagcacccgcaccagcaccccttcgagccgggcaagttcctcgaccaaggtctggacgacaactattgccggaatcctgacggctccgagcggccatggtgctacactacggatccgcagatcgagcgagagttctgtgacctcccccgctgcgggtccgaggcacagccccgccaagaggccacaactgtcagctgcttccgcgggaagggtgagggctaccggggcacagccaataccaccactgcgggcgtaccttgccagcgttgggacgcgcaaatcccgcatcagcaccgatttacgccagaaaaatacgcgtgcaaagaccttcgggagaacttctgccggaaccccgacggctcagaggcgccctggtgcttcacactgcggcccggcatgcgcgcggccttttgctaccagatccggcgttgtacagacgacgtgcggccccaggactgctaccacggcgcaggggagcagtaccgcggcacggtcagcaagacccgcaagggtgtccagtgccagcgctggtccgctgagacgccgcacaagccgcagttcacgtttacctccgaaccgcatgcacaactggaggagaacttctgccggaacccagatggggatagccatgggccctggtgctacacgatggacccaaggaccccattcgactactgtgccctgcgacgctgcgctgatgaccagccgccatcaatcctggaccccccagaccaggtgcagtttgagaagtgtggcaagagggtggatcggctggatcagcggcgttccaagctgcgcgtggttgggggccatccgggcaactcaccctggacagtcagcttgcggaatcggcagggccagcatttctgcggggggtctctagtgaaggagcagtggatactgactgcccggcagtgcttctcctcctgccatatgcctctcacgggctatgaggtatggttgggcaccctgttccagaacccacagcatggagagccaagcctacagcgggtcccagtagccaagatggtgtgtgggccctcaggctcccagcttgtcctgctcaagctggagagatctgtgaccctgaaccagcgtgtggccctgatctgcctgccccctgaatggtatgtggtgcctccagggaccaagtgtgagattgcaggctggggtgagaccaaaggtacgggtaatgacacagtcctaaatgtggcctttctgaatgttatctccaaccaggagtgtaacatcaagcaccgaggacgtgtgcgggagagtgagatgtgcactgagggactgttggcccctgtgggggcctgtgagggtgactacgggggcccacttgcctgctttacccacaactgctgggtcctggaaggaattataatccccaaccgagtatgcgcaaggtcccgctggccagctgtcttcacgcgtgtctctgtgtttgtggactggattcacaaggtcatgagactgggttaggcccagccttgatgccatatgccttggggaggacaaaacttcttgtcagacataaagccatgtttcctcttta

SEQ ID NO: 136 - DNA, 892 bp, human
gcgcgccagtttcaggatgcagggtctaggagaggagccgcaatcgtgtctggggccccagccaggctggccggagctcctgtttccgctgctctgctgcctgcccggggtaccaacatggcccagaagcgtcctgcctgcaccctgaagcctgagtgtgtccagcagctgctggtttgctcccaggaggccaagaagtcagcctactgcccctacagtcactttcctgtgggggctgccctgctcacccaggaggggagaatcttcaaagggtgcaacatagaaaatgcctgctacccgctgggcatctgtgctgaacggaccgctatccagaaggccgtctcagaagggtacaaggatttcagggcaattgctatcgccagtgacatgcaagatgattttatctctccatgtggggcctgcaggcaagtcatgagagagtttggcaccaactggcccgtgtacatgaccaagccggatggtacgtatattgtcatgacggtccaggagctgctgccctcctcctttgggcctgaggacctgcagaagactcagtgacagccagagaatgcccactgcctgtaacagccacctggagaacttcataaagatgtctcacagccctggggacacctgcccagtggccccagcctacagggactgggcaaagatgatgtttccagattacactccagcctgagtcagcacccctcctagcaacctgccttgggacttagaacaccgccgcccccctgccccacctttcctttccttcctgtgggccctctttcaaagtccagcctagtctggactgcttccccatcagccttcccaaggttctatcctgttccgagcaacttttctaattataaacatcacagaacatcctgga

SEQ ID NO: 137 - DNA, 2254 bp, human
aaagaaccgcacaccacagactccctccagctctttgtgtgtggctctctcagggtccaacaagagcaagctgtgggtctgtgagtgtttatgtgtgcttttattcacttcacacttattgaaaagtgtgtatgtgagagggtggggtgtgtgtgtcaaagagagtgaggaagagaaggagagagagatcaattgattctgcagcctcagctccagcatccctcagttgggagcttccaaagccgggtgatcacttggggtgcatagctcggagatgcagtccccctggaaaatccttacggtggcgcctctattcttgctcctgtctcttcagtcctcggcctctccagccaacgatgaccagtccaggcccagcctctcgaatgggcacacctgtgtagggtgtgtgctggtggtgtctgtaatagaacagcttgctcaagttcacaactcgacggtccaggcctcgatggagagactgtgcagctacctgcctgaaaaactgttcttgaaaaccacctgctatttagtcattgacaagtttggatcagacatcataaaactgcttagcgcagatatgaatgctgatgtggtatgtcacactctggagttttgtaaacagaacactggccaaccattgtgtcatctctaccctcttcccaaggagacatggaaatttacactacagaaggcaagacaaattgtcaagaagtccccgattctgaaatattctagaagtggttctgacatttgttcactcccggttttggccaagatctgccagaaaattaaattagctatggaacagtctgtgccattcaaagatgtggattcagacaaatacagcgttttcccaacactgcggggctatcactggcgggggagagactgtaatgacagcgacgagtcagtgtacccaggtagaaggccgaacaactgggatgtccatcaggattcaaactgtaatggcatttggggtgtcgatccaaaagatggagttccatatgagaagaaattctgtgaaggttcacagcccaggggaatcattttgctgggagactcagctggggctcattttcacatctctcctgaatggatcacagcgtcgcagatgtctttgaactctttcatcaatctaccaacagcccttaccaacgagcttgactggccccaactctctggtgctacaggatttctggactccactgttggaattaaagaaaaatctatttaccttcgcttatggaaaagaaaccactgtaatcacagggactaccagaatatttcaagaaatggtgcatcttcccgaaacctgaagaaatttatagaaagcttgtctagaaacaaggtgttggactatcccgccatcgttatatatgccatgattggaaatgatgtctgcagtgggaagagtgacccagtcccagccatgaccactcctgagaaactctactccaacgtcatgcagactctgaagcatctaaattcccacctgcccaatggcagccatgttattttgtatggcttaccagatggaacctttctctgggataatttgcacaacagatatcatcctctcggccagctaaataaagacatgacctatgcgcagttgtactccttcctgaactgcctccaggtcagcccctgccacggctggatgtcttccaacaagacgttgcggactctcacttcagagagagcagagcaactctccaacacactgaaaaaaattgcagccagtgagaaatttacaaacttcaatcttttctacatggattttgccttccatgaaatcatacaggagtggcagaagagaggcggacagccctggcagctcatcgagcccgtggatggattccaccccaacgaggtggctttgctgttgttggcggatcatttctggaaaaaggtgcagctccagtggccccaaatcctgggaaaggagaatccgttcaacccccagattaaacaggtgtttggagaccaaggcgggcactgagcctctcaggagcatgcacccctggggagcacagggaggcagaggcttgggtaaactcattccacaaaccctatgggggctgccacgtcacaggcccaaaggactcttcttcagcagcatctttgcaaaatgtctttctctcaatgaagagcatatctggacgactgtgcaatgctgtgtgctcccggggatcagtaacccttccgctgttcctgaaataacctttcataaagtgctttgggtgccattcca

SEQ ID NO: 138 - DNA, 1193 bp, human
ataaatggggaggggagagcccactgggtagaaggaacagggagcggccaggatgctgaatctgctgctgctggcgctgcccgtcctggcgagccgcgcctacgcggcccctgccccaggccaggccctgcagcgagtgggcatcgtcgggggtcaggaggcccccaggagcaagtggccctggcaggtgagcctgagagtccacggcccatactggatgcacttctgcgggggctccctcatccacccccagtgggtgctgaccgcagcgcactgcgtgggaccggacgtcaaggatctggccgccctcagggtgcaactgcgggagcagcacctctactaccaggaccagctgctgccggtcagcaggatcatcgtgcacccacagttctacaccgcccagatcggagcggacatcgccctgctggagctggaggagccggtgaacgtctccagccacgtccacacggtcaccctgccccctgcctcagagaccttccccccggggatgccgtgctgggtcactggctggggcgatgtggacaatgatgagcgcctcccaccgccatttcctctgaagcaggtgaaggtccccataatggaaaaccacatttgtgacgcaaaataccaccttggcgcctacacgggagacgacgtccgcatcgtccgtgacgacatgctgtgtgccgggaacacccggagggactcatgccagggcgactccggagggcccctggtgtgcaaggtgaatggcacctggctgcaggcgggcgtggtcagctggggcgagggctgtgcccagcccaaccggcctggcatctacacccgtgtcacctactacttggactggatccaccactatgtccccaaaaagccgtgagtcaggcctgggttggccacctgggtcactggaggaccaacccctgctgtccaaaacaccactgcttcctacccaggtggcgactgccccccacaccttccctgccccgtcctgagtgccccttcctgtcctaagccccctgctctcttctgagccccttcccctgtcctgaggacccttccctatcctgagcccccttccctgtcctaagcctgacgcctgcaccgggccctccagccctcccctgcccagatagctggtggtgggcgctaatcctcctgagtgctggacctcattaaagtgcatggaaatc

SEQ ID NO: 139 - DNA, 5347 bp, human
cgaatatatcagatttaaccatatgaaattgccattttgtaggtgataataaacagttgactatcatcaatttcataggcctgatgtcaatttcatatttcattctttaaagaccgccactcattgttggaaataaaaggacaaaggtaggctggcatagcctctccaagagagcagatcgctgcacttacaaagggttttggggatgtgtggagttcaaggactggtgaggttttggaggcatacatgggttgatggcatctgtataggtggttacttgaaaagcctgttattcatcagttgcccctcaagtctgcagtgagtcggctaactctcagaagccaggggttgtcatggactggctgccttacaaaagctgtgcactgaggggtgtttacatgatggaataggttcaaagctggttctagtggccacttgttaccatggctgcagatgatccgagaactttcattctcatggttcaacctaagaaaggtctataagagtataccccactcttgaaagcaggtggtggagacgttgactactcaccaccatttcctgaaatcaatttgaagagaaagatacctttgtggacactgttctcaagttctgaaagtgggtagcattacattggcagtttaaacacttgcttttttttttttgagtcttgctctgtcacccagtttggagtgcagtggtgcagtctcggctcactgcgacctcggcctcctggattcaagttcagcctcccgggtggctgggattgtaggagtgtgccaccacgcatggctaatctttttgtgtttttggtggagatggagtttcacactgtttgcggactggtaccaagttcctgacttcaaatgctctgcctgcctcggcctccctaggtgttgggattacaggcgtgagccaccgtgctcagcctaaatacttgctttgattttgcagatctggtgctccaaattgattaagacacaagaccgttctctccaaatcagagagctactcatctctcccttccatgtgtttcttgtactgctccctctatctcttatcatgagactcctctcttcctgcagtgtggtaaaactacagcaatcgtcttaacctgtgagatctgtcacctttgcattttccactcatgcagctggttctataaaccaactcttctgcttggggggatctaatcatgaccttttacccttttgtggcctcttctagtacaaggcgagtggataattccaacacaagactggcagtccaaattgaaagagatccagggaatgatgacaacaatctcaattccattttttatgaacacttgacaaggaccctccaggagtccctctgtggagacttagttcttggacgttggggcaactacagctctggcgattgctttattttggcttcagatgacctcaatgcctttgttcacctgattgaaattggaaatggtcttgtcacctttcaacttcgaggactggaattccgaggaacctactgccagcagagggaggtagaagccatcatggagggcgacgaggaggacagaggctgctgctgctgcaaaccaggccacttgcctcacctgctgtcctgcaacgctgcctttcacctccgctggctcacctgggaaatcacgcagacccagtacatcctggagggctacagcatcctggacaacaacgcggccaccatgctgcaggtgtttgacctccgaaggatcctcatccgctactacatcaagagtataatatactatatggtaacgtctcccaaactcctctcctggatcaaaaatgaatcacttctgaagtccctgcagccctttgccaagtggcattacattgagcgtgaccttgcaatgttcaacattaacattgatgatgactacgtcccgtgtctccaggggatcacacgagctagcttctgcaatgtttatctagaatggattcaacactgtgcacggaaaagacaagagccttcaacgaccctggacagtgacgaggactctcccttggtgactctgtccttcgccctgtgcaccctggggaggagagctctgggaacagccgctcacaatatggccatcagcctggattctttcctgtatggcctccatgtcctcttcaaaggtgacttcagaataacagcacgtgacgagtgggtatttgctgacatggacctactgcataaagttgtagctccagctatcaggatgtccctgaaacttcaccaggaccagttcacttgccctgacgagtatgaagacccagcagtcctctacgaggccatccagtccttcgagaagaaggtggtcatctgccacgagggcgacccggcctggcggggcgcagtgctgtccaacaaggaagagctgctcaccctgcggcacgtggtggacgagggtgccgacgagtacaaggtcatcatgctccacagaagcttcctgagcttcaaggtgatcaaggttaacaaagaatgcgtccgaggactttgggccgggcagcagcaggagcttatatttcttcgcaaccgcaatccggagcgcggcagtatccagaacaataagcaggtcctgcggaacttgattaactcctcctgcgatcagcccctggggtaccccatgtatgtctccccactaaccacatcctacctagggacacacaggcagctgaagaacatctggggtggacccatcactttggacagaattaggacctggttctggaccaagtgggtaaggatgcggaaggattgcaatgcccgccagcacagtggcggcaacattgaagacgtggacggaggaggggccccgacgacaggtggcaacaatgccccgaatggtggcagccaggagagcagcgcagaacagcccagaaaaggcggtgctcagcacggggtgtcatcctgtgaagggacacagagaacaggcaggaggaaaggcaggagccagtccgtgcaggcacactcagcgctaagccaaaggccgcccatgctgagctcatctggccccatcttagagagccgccaaacattcctccagacgtccacctcagtgcacgagctggcccagaggctctcgggcagccggctctccttgcacgcctcggccacgtccctgcactctcagcccccgcccgtcaccaccaccggccacctgagtgtccgtgagcgggccgaggcgctcatcaggtccagcctgggctcctccaccagctccaccctgagcttcctcttcggcaagaggagcttttccagcgcgctcgtcatttccggactctctgctgcggaggggggcaataccagtgacacccagtcatccagcagcgtcaacatcgtgatgggcccctcagccagggctgccagccaggccactcgggtaaggggctgggcagggctcaccaggacaggctgggatggtggcacgggctcctggcctgagcgtggcacctgccttgcgttcccacccttctgcctgcagaaccccatccccttctctatggggctcccagagtgacaaaggacagtgattagacacgaagtggcttagctgctcttgaaagcagacaagatacagagcagatatcctgtaaacgataatgcccaggcaggcactgaaaggagtcaccggatacagaggttctgcagaactgtggccatctgccctacaccggggcatgacggagaatgccctccacccattcacacagcaggactcttctcacatgattctggcctgagggagaggaaaggacacctgtcaatgctggagttagagcttcactgcttctcagccaatcgatttgactttaaagctgctgagatggcccactgcttttaggtatttaaatactagacaaggagagttctaaggacttcacccaaataagctgttacttgtccagaatcccaaaccagctgagatgaaatgaatacttgagcttcttcagtgagaaaaaagtaaataaatacccagcagtgctcctatgtgacctggtagacagggaaaatcgatggtgtcaaggcaaaaatgggtcaggtttggagagttcccccactccttttgagtgttcaggttttccttaccatggctcatgctttccatcaagcaccagagttgcagtggcttggcctctggttctgggtgaggttatttgcaggtggagacggggggctgcacctgaacatttctagtgtcaccctccctctccttcatgggaaacagctctccagggaagtaccttcctgccaggggaagccaaggctgggccggccgccctacaaggagccacaggattgcagccatgggtgccacctttcatggaaggggagatttatgggctttcctggaacccccaggctgtcctggccaagaggaaagaggtggttacttcaggagtttgaccttagttagataactaaaagaatacatttcccctcccttttctttatttcctcaataaaaatgtacaaagtatcacccttctccatgccccaatctgtgttaaagtcacaatctatgggtgtagttctgggattctgtcaaattctccttcctgctctccaaaatggacaattgtcgtagggaccacatgcccccagaatacaatggcctctgtgttctactggggtcaagcctgctagaactcagcattcatgacaggggctaagtgtgcatgaagtgacactgactacagctagaaagccaggcgcacaaatgccccttccccccagggccgctctttccagcgcagtcatccagaaaggcccacgtgcagagcccctgtgtctcagatgctgcttcagttgcccgtcctgtcctcagaggccactgtgctggccctctatcatttgacctgactttagaacctgacctcaaggatatggcagcgctagcctttagctcccacagcacggatgggggtgatgccagttagaagtgggtagtgaacgtttgctgagctgttcactgtttctctcttctctttggaagcacctctccgagccatgtgagccccctgatgccaccgagcaggggcagcttcatgaccgatgtctggctgaggctgtggcggacactctcggggttgtctgcaggagagcaagccaggaggacatgggcctggacgacacggcctcgcagcaaagtgtgtcagacgagcagtgacgggcgtgcggccgggcggggaggctggctcccccacacctcccacctgcattgctctccctcgtgctccccaaatcaccacaaccaaccaataccgcgatccatgagggactcctcctgtggaaaaggagagctgttccagaacacagaactgatctcaggtttttg

SEQ ID NO: 140 - DNA, 1506 bp, human
tcgacgcaggaggaaaccgactgctgcctggtctgcaaagaagtcctttcaagtctctaggactggactcttcctaagcaagtccgagaaggaagcaccctcactatgtggctctacctggcggccttcgtgggcctgtactaccttctgcactggtaccgggagaggcaggtggtgagccacctccaagacaagtatgtctttatcacgggctgtgactcgggctttgggaacctgctggccagacagctggatgcacgaggcttgagagtgctggctgcgtgtctgacggataagggggccgagcagctgaggggccagacgtctgacaggctggagacggtgaccctggatgttaccaagatggagagcatcgctgcagctactcagtgggtgaaggagcatgtgggggacagaagactctggggactggtgaacaatgcaggcattcttacaccaattaccttatgtgagtggctgaacactgaggactctatgaatatgctcaaagtgaacctcattggtgtgatccaggtgaccttgagcatgcttcctttggtgaggagagcacgggggaagaattgtcaatgtctccagcattctgggaagagttgctttctttgtagaggctactgtgtctccaagtatggagtggaagccttttcagatattctgaggcgtgagattcaacattttggggtgaaaatcagcatagttgaacctggctacttcagaacgggaatgacaaacatgacacagtccttagagcgaatgaagcaaagttggaaagaagcccccaagcatattaaggagacctatggacagcagtattttgatgccctttacaatatcatgaaggaagggctgttgaattgtagcacaaacctgaacctggtcactgactgcatggaacatgctctgacatcggtgcatccgcgaactcgatattcagctggctgggatgctaaatttttcttcatccctctatcttatttacctacatcactggcagactacattttgactagatcttggcccaaaccagcccaggcagtctaaagaaaactgggttggtgcttcttggaatgaaggcaaaaatctgaaattgttagtgtctcagtaatcctgatttagaacccaggctttttgtaacaatgtgttttcttgcctaaattcatttatctggcatcatcagagtactaacatgtttatatttcagatatccaaagcttaccactttaggtgatgaatctttactattttagcccttttttgatgagactatttgtctaaagtgaatcatttgttcttgccttattaaacagagtagatggaaaacaatttaacctattttgaagtcatttctttatgaatatgaataattgttctatgctttaataatctattgtgaggaaactactaagaaatatgttggtgtgtttgtccttacttgaaatgggtctgtattatggtacttttaataaatatttgatttttctttgtcga

SEQ ID NO: 141 - DNA, 14392 bp, human
gcagacctaaaggagcgttcgctagcagaggcgctgccggtgcggtgtgctacgcgcgcccacctcccggggaaggaacggcgaggccggggaccgtcgcggagatggatcgcgggccggcagcagtggcgtgcacgctgctcctggctctcgtcgcctgcctagcgccggccagtggccaagaatgtgacagtgcgcattttcgctgtggaagtgggcattgcatccctgcagactggaggtgtgatgggaccaaagactgttcagatgacgcggatgaaattggctgcgctgttgtgacctgccagcagggctatttcaagtgccagagtgagggacaatgcatccccagctcctgggtgtgtgaccaagatcaagactgtgatgatggctcagatgaacgtcaagattgctcacaaagtacatgctcaagtcatcagataacatgctccaatggtcagtgtatcccaagtgaatacaggtgcgaccacgtcagagactgccccgatggagctgatgagaatgactgccagtacccaacatgtgagcagcttacttgtgacaatggggcctgctataacaccagtcagaagtgtgattggaaagttgattgcagggactcctcagatgaaatcaactgcactgagatatgcttgcacaatgagttttcatgtggcaatggagagtgtatccctcgtgcttatgtctgtgaccatgacaatgattgccaagacggcagtgatgaacatgcttgcaactatccgacctgcggtggttaccagttcacttgccccagtggccgatgcatttatcaaaactgggtttgtgatggagaagatgactgtaaagataatggagatgaagatggatgtgaaagcggtcctcatgatgttcataaatgttccccaagagaatggtcttgcccagagtcgggacgatgcatctccatttataaagtttgtgatgggattttagattgcccaggaagagaagatgaaaacaacactagtaccggaaaatactgtagtatgactctgtgctctgccttgaactgccagtaccagtgccatgagacgccgtatggaggagcgtgtttttgtcccccaggttatatcatcaaccacaatgacagccgtacctgtgttgagtttgatgattgccagatatggggaatttgtgaccagaagtgtgaaagccgacctggccgtcacctgtgccactgtgaagaagggtatatcttggagcgtggacagtattgcaaagctaatgattcctttggcgaggcctccattatcttctccaatggtcgggatttgttaattggtgatattcatggaaggagcttccggatcctagtggagtctcagaatcgtggagtggccgtgggtgtggctttccactatcacctgcaaagagttttttggacagacaccgtgcaaaataaggttttttcagttgacattaatggtttaaatatccaagaggttctcaatgtttctgttgaaaccccagagaacctggctgtggactgggttaataataaaatctatctagtggaaaccaaggtcaaccgcatagatatggtaaatttggatggaagctatcgggttacccttataactgaaaacttggggcatcctagaggaattgccgtggacccaactgttggttatttatttttctcagattgggagagcctttctggggaacctaagctggaaagggcattcatggatggcagcaaccgtaaagacttggtgaaaacaaagctgggatggcctgctggggtaactctggatatgatatcgaagcgtgtttactgggttgactctcggtttgattacattgaaactgtaacttatgatggaattcaaaggaagactgtagttcatggaggctccctcattcctcatccctttggagtaagcttatttgaaggtcaggtgttctttacagattggacaaagatggccgtgctgaaggcaaacaagttcacagagaccaacccacaagtgtactaccaggcttccctgaggccctatggagtgactgtttaccattccctcagacagccctatgctaccaatccgtgtaaagataacaatgggggctgtgagcaggtctgtgttctcagccacagaacagataatgatggtttgggtttccgttgcaagtgcacattcggcttccaactggatacagatgagcgccactgcattgctgttcagaatttcctcattttttcatcccaagttgctattcgtgggatcccgttcaccttgtctacccaggaagatgtcatggttccagtttcggggaatccttctttctttgtcgggattgattttgacgcccaggacagcactatctttttttcagatatgtcaaaacacatgatttttaagcaaaagattgatggcacaggaagagaaattctcgcagctaacagggtggaaaatgttgaaagtttggcttttgattggatttcaaagaatctctattggacagactctcattacaagagtatcagtgtcatgaggctagctgataaaacgagacgcacagtagttcagtatttaaataacccacggtcggtggtagttcatccttttgccgggtatctattcttcactgattggttccgtcctgctaaaattatgagagcatggagtgacggatctcacctcttgcctgtaataaacactactcttggatggcccaatggcttggccatcgattgggctgcttcacgattgtactgggtagatgcctattttgataaaattgagcacagcacctttgatggtttagacagaagaagactgggccatatagagcagatgacacatccgtttggacttgccatctttggagagcatttattttttactgactggagactgggtgccattattcgagtcaggaaagcagatggtggagaaatgacagttatccgaagtggcattgcttacatactgcatttgaaatcgtatgatgtcaacatccagactggttctaacgcctgtaatcaacccacgcatcctaacggtgactgcagccacttctgcttcccggtgccaaatttccagcgagtgtgtgggtgcccttatggaatgaggctggcttccaatcacttgacatgcgagggggacccaaccaatgaaccacccacggagcagtgtggcttattttccttcccctgtaaaaatggcagatgtgtgcccaattactatctctgtgatggagtcgatgattgtcatgataacagtgatgagcaactatgtggcacacttaataatacctgttcatcttcggcgttcacctgtggccatggggagtgcattcctgcacactggcgctgtgacaaacgcaacgactgtgtggatggcagtgatgagcacaactgccccacccacgcacctgcttcctgccttgacacccaatacacctgtgataatcaccagtgtatctcaaagaactgggtctgtgacacagacaatgattgtggggatggatctgatgaaaagaactgcaattcgacagagacatgccaacctagtcagtttaattgccccaatcatcgatgtattgacctatcgtttgtctgtgatggtgacaaggattgtgttgatggatctgatgaggttggttgtgtattaaactgtactgcttctcaattcaagtgtgccagtggggataaatgtattggcgtcacaaatcgttgtgatggtgtttttgattgcagtgacaactcggatgaagcgggctgtccaaccaggcctcctggtatgtgccactcagatgaatttcagtgccaagaagatggtatctgcatcccgaacttctgggaatgtgatgggcatccagactgcctctatggatctgatgagcacaatgcctgtgtccccaagacttgcccttcatcatatttccactgtgacaacggaaactgcatccacagggcatggctctgtgatcgggacaatgactgcggggatatgagtgatgagaaggactgccctactcagccctttcgctgtcctagttggcaatggcagtgtcttggccataacatctgtgtgaatctgagtgtagtgtgtgatggcatctttgactgccccaatgggacagatgagtccccactttgcaatgggaacagctgctcagatttcaatggtggttgtactcacgagtgtgttcaagagccctttggggctaaatgcctatgtccattgggattcttacttgccaatgattctaagacctgtgaagacatagatgaatgtgatattctaggctcttgtagccagcactgttacaatatgagaggttctttccggtgctcgtgtgatacaggctacatgttagaaagtgatgggaggacttgcaaagttacagcatctgagagtctgctgttacttgtggcaagtcagaacaaaattattgccgacagtgtcacctcccaggtccacaatatctattcattggtcgagaatggttcttacattgtagctgttgattttgattcaattagtggtcgtatcttttggtctgatgcaactcagggtaaaacctggagtgcgtttcaaaatggaacggacagaagagtggtatttgacagtagcatcatcttgactgaaactattgcaatagattgggtaggtcgtaatctttactggacagactatgctctggaaacaattgaagtctccaaaattgatgggagccacaggactgtgctgattagtaaaaacctaacaaatccaagaggactagcattagatcccagaatgaatgagcatctactgttctggtctgactggggccaccaccctcgcatcgagcgagccagcatggacggcagcatgcgcactgtcattgtccaggacaagatcttctggccctgcggcttaactattgactaccccaacagactgctctacttcatggactcctatcttgattacatggacttttgcgattataatggacaccatcggagacaggtgatagccagtgatttgattatacggcacccctatgccctaactctctttgaagactctgtgtactggactgaccgtgctactcgtcgggttatgcgagccaacaagtggcatggagggaaccagtcagttgtaatgtataatattcaatggccccttgggattgttgcggttcatccttcgaaacaaccaaattccgtgaatccatgtgccttttcccgctgcagccatctctgcctgctttcctcacaggggcctcatttttactcctgtgtttgtccttcaggatggagtctgtctcctgatctcctgaattgcttgagagatgatcaacctttcttaataactgtaaggcaacatataatttttggaatctcccttaatcctgaggtgaagagcaatgatgctatggtccccatagcagggatacagaatggtttagatgttgaatttgatgatgctgagcaatacatctattgggttgaaaatccaggtgaaattcacagagtgaagacagatggcaccaacaggacagtatttgcttctatatctatggtggggccttctatgaacctggccttagattggatttcaagaaacctttattctaccaatcctagaactcagtcaatcgaggttttgacactccacggagatatcagatacagaaaaacattgattgccaatgatgggacagctcttggagttggctttccaattggcataactgttgatcctgctcgtgggaagctgtactggtcagaccaaggaactgacagtggggttcctgccaagatcgccagtgctaacatggatggcacatctgtgaaaactctctttactgggaacctcgaacacctggagtgtgtcactcttgacatcgaagagcagaaactctactgggcagtcactggaagaggagtgattgaaagaggaaacgtggatggaacagatcggatgatcctggtacaccagctttcccacccctggggaattgcagtccatgattctttcctttattatactgatgaacagtatgaggtcattgaaagagttgataaggccactggggccaacaaaatagtcttgagagataatgttccaaatctgaggggtcttcaagtttatcacagacgcaatgccgccgaatcctcaaatggctgtagcaacaacatgaatgcctgtcagcagatttgcctgcctgtaccaggaggattgttttcctgcgcctgtgccactggatttaaactcaatcctgataatcggtcctgctctccatataactctttcattgttgtttcaatgctgtctgcaatcagaggctttagcttggaattgtcagatcattcagaaaccatggtgccggtggcaggccaaggacgaaacgcactgcatgtggatgtggatgtgtcctctggctttatttattggtgtgattttagcagctcagtggcatctgataatgcgatccgtagaattaaaccagatggatcttctctgatgaacattgtgacacatggaataggagaaaatggagtccggggtattgcagtggattgggtagcaggaaatctttatttcaccaatgcctttgtttctgaaacactgatagaagttctgcggatcaatactacttaccgccgtgttcttcttaaagtcacagtggacatgcctaggcatattgttgtagatcccaagaacagatacctcttctgggctgactatgggcagagaccaaagattgagcgttctttccttgactgtaccaatcgaacagtgcttgtgtcagagggcattgtcacaccacggggcttggcagtggaccgaagtgatggctacgtttattgggttgatgattctttagatataattgcaaggattcgtatcaatggagagaactctgaagtgattcgttatggcagtcgttacccaactccttatggcatcactgtttttgaaaattctatcatatgggtagataggaatttgaaaaagatcttccaagccagcaaggaaccagagaacacagagccacccacagtgataagagacaatatcaactggctaagagatgtgaccatctttgacaagcaagtccagccccggtcaccagcagaggtcaacaacaacccttgcttggaaaacaatggtgggtgctctcatctctgctttgctctgcctggattgcacaccccaaaatgtgactgtgcctttgggaccctgcaaagtgatggcaagaattgtgccatttcaacagaaaatttcctcatctttgccttgtctaattccttgagaagcttacacttggaccctgaaaaccatagcccacctttccaaacaataaatgtggaaagaactgtcatgtctctagactatgacagtgtaagtgatagaatctacttcacacaaaatttagcctctggagttggacagatttcctatgccaccctgtcttcagggatccatactccaactgtcattgcttcaggtatagggactgctgatggcattgcctttgactggattactagaagaatttattacagtgactacctcaaccagatgattaattccatggctgaagatgggtctaaccgcactgtgatagcccgcgttccaaaaccaagagcaattgtgttagatccctgccaagggtacctgtactgggctgactgggatacacatgccaaaatcgagagagccacattgggaggaaacttccgggtacccattgtgaacagcagtctggtcatgcccagtgggctgactctggactatgaagaggaccttctctactgggtggatgctagtctgcagaggattgaacgcagcactctgacgggcgtggatcgtgaagtcattgtcaatgcagccgttcatgcttttggcttgactctctatggccagtatatttactggactgacttgtacacacaaagaatttaccgagctaacaaatatgacgggtcaggtcagattgcaatgaccacaaatttgctctcccagcccaggggaatcaacactgttgtgaagaaccagaaacaacagtgtaacaatccttgtgaacagtttaatgggggctgcagccatatctgtgcaccaggtccaaatggtgccgagtgccagtgtccacatgagggcaactggtatttggccaacaacaggaagcactgcattgtggacaatggtgaacgatgtggtgcatcttccttcacctgctccaatgggcgctgcatctcggaagagtggaagtgtgataatgacaacgactgtggggatggcagtgatgagatggaaagtgtctgtgcacttcacacctgctcaccgacagccttcacctgtgccaatgggcgatgtgtccaatactcttaccgctgtgattactacaatgactgtggtgatggcagtgatgaggcagggtgcctgttcagggactgcaatgccaccacggagtttatgtgcaataacagaaggtgcatacctcgtgagtttatctgcaatggtgtagacaactgccatgataataacacttcagatgagaaaaattgccctgatcgcacttgccagtctggatacacaaaatgtcataattcaaatatttgtattcctcgcgtttatttgtgtgacggagacaatgactgtggagataacagtgatgaaaaccctacttattgcaccactcacacatgcagcagcagtgagttccaatgcgcatctgggcgctgtattcctcaacattggtattgtgatcaagaaacagattgttttgatgcctctgatgaacctgcctcttgtggtcactctgagcgaacatgcctagctgatgagttcaagtgtgatggtgggaggtgcatcccaagcgaatggatctgtgacggtgataatgactgtggggatatgagtgacgaggataaaaggcaccagtgtcagaatcaaaactgctcggattccgagtttctctgtgtaaatgacagacctccggacaggaggtgcattccccagtcttgggtctgtgatggcgatgtggattgtactgacggctacgatgagaatcagaattgcaccaggagaacttgctctgaaaatgaattcacctgtggttacggactgtgtatcccaaagatattcaggtgtgaccggcacaatgactgtggtgactatagcgacgagaggggctgcttataccagacttgccaacagaatcagtttacctgtcagaacgggcgctgcattagtaaaaccttcgtctgtgatgaggataatgactgtggagacggatctgatgagctgatgcacctgtgccacaccccagaacccacgtgtccacctcacgagttcaagtgtgacaatgggcgctgcatcgagatgatgaaactctgcaaccacctagatgactgtttggacaacagcgatgagaaaggctgtggcattaatgaatgccatgacccttcaatcagtggctgcgatcacaactgcacagacaccttaaccagtttctattgttcctgtcgtcctggttacaagctcatgtctgacaagcggacttgtgttgatattgatgaatgcacagagatgccttttgtctgtagccagaagtgtgagaatgtaataggctcctacatctgtaagtgtgccccaggctacctccgagaaccagatggaaagacctgccggcaaaacagtaacatcgaaccctatctcatttttagcaaccgttactatttgagaaatttaactatagatggctatttttactccctcatcttggaaggactggacaatgttgtggcattagattttgaccgagtagagaagagattgtattggattgatacacagaggcaagtcattgagagaatgtttctgaataagacaaacaaggagacaatcataaaccacagactaccagctgcagaaagtctggctgtagactgggtttccagaaagctctactggttggatgcccgcctggatggcctctttgtctctgacctcaatggtggacaccgccgcatgctggcccagcactgtgtggatgccaacaacaccttctgctttgataatcccagaggacttgcccttcaccctcaatatgggtacctctactgggcagactggggtcaccgcgcatacattgggagagtaggcatggatggaaccaacaagtctgtgataatctccaccaagttagagtggcctaatggcatcaccattgattacaccaatgatctactctactgggcagatgcccacctgggttacatagagtactctgatttggagggccaccatcgacacacggtgtatgatggggcactgcctcaccctttcgctattaccatttttgaagacactatttattggacagattggaatacaaggacagtggaaaagggaaacaaatatgatggatcaaatagacagacactggtgaacacaacacacagaccatttgacatccatgtgtaccatccatataggcagcccattgtgagcaatccctgtggtaccaacaatggtggctgttctcatctctgcctcatcaagccaggaggaaaagggttcacttgcgagtgtccagatgacttccgcacccttcaactgagtggcagcacctactgcatgcccatgtgctccagcacccagttcctgtgcgctaacaatgaaaagtgcattcctatctggtggaaatgtgatggacagaaagactgctcagatggctctgatgaactggccctttgcccgcagcgcttctgccgactgggacagttccagtgcagtgacggcaactgcaccagcccgcagactttatgcaatgctcaccaaaattgccctgatgggtctgatgaagaccgtcttctttgtgagaatcaccactgtgactccaatgaatggcagtgcgccaacaaacgttgcatcccagaatcctggcagtgtgacacatttaacgactgtgaggataactcagatgaagacagttcccactgtgccagcaggacctgccggccgggccagtttcggtgtgctaatggccgctgcatcccgcaggcctggaagtgtgatgtggataatgattgtggagaccactcggatgagcccattgaagaatgcatgagctctgcccatctctgtgacaacttcacagaattcagctgcaaaacaaattaccgctgcatcccaaagtgggccgtgtgcaatggtgtagatgactgcagggacaacagtgatgagcaaggctgtgaggagaggacatgccatcctgtgggggatttccgctgtaaaaatcaccactgcatccctcttcgttggcagtgtgatgggcaaaatgactgtggagataactcagatgaggaaaactgtgctccccgggagtgcacagagagcgagtttcgatgtgtcaatcagcagtgcattccctcgcgatggatctgtgaccattacaacgactgtggggacaactcagatgaacgggactgtgagatgaggacctgccatcctgaatattttcagtgtacaagtggacattgtgtacacagtgaactgaaatgcgatggatccgctgactgtttggatgcgtctgatgaagctgattgtcccacacgctttcctgatggtgcatactgccaggctactatgttcgaatgcaaaaaccatgtttgtatcccgccatattggaaatgtgatggcgatgatgactgtggcgatggttcagatgaagaacttcacctgtgcttggatgttccctgtaattcaccaaaccgtttccggtgtgacaacaatcgctgcatttatagtcatgaggtgtgcaatggtgtggatgactgtggagatggaactgatgagacagaggagcactgtagaaaaccgacccctaaaccttgtacagaatatgaatataagtgtggcaatgggcattgcattccacatgacaatgtgtgtgatgatgccgatgactgtggtgactggtccgatgaactgggttgcaataaaggaaaagaaagaacatgtgctgaaaatatatgcgagcaaaattgtacccaattaaatgaaggaggatttatctgctcctgtacagctgggttcgaaaccaatgtttttgacagaacctcctgtctagatatcaatgaatgtgaacaatttgggacttgtccccagcactgcagaaataccaaaggaagttatgagtgtgtctgtgctgatggcttcacgtctatgagtgaccgccctggaaaacgatgtgcagctgagggtagctctcctttgttgctactgcctgacaatgtccgaattcgaaaatataatctctcatctgagaggttctcagagtatcttcaagatgaggaatatatccaagctgttgattatgattgggatcccaaggacataggcctcagtgttgtgtattacactgtgcgaggggagggctctaggtttggtgctatcaaacgtgcctacatccccaactttgaatccggccgcaataatcttgtgcaggaagttgacctgaaactgaaatacgtaatgcagccagatggaatagcagtggactgggttggaaggcatatttactggtcagatgtcaagaataaacgcattgaggtggctaaacttgatggaaggtacagaaagtggctgatttccactgacctggaccaaccagctgctattgctgtgaatcccaaactagggcttatgttctggactgactggggaaaggaacctaaaatcgagtctgcctggatgaatggagaggaccgcaacatcctggttttcgaggaccttggttggccaactggcctttctatcgattatttgaacaatgaccgaatctactggagtgacttcaaggaggacgttattgaaaccataaaatatgatgggactgataggagagtcattgcaaaggaagcaatgaacccttacagcctggacatctttgaagaccagttatactggatatctaaggaaaagggagaagtatggaaacaaaataaatttgggcaaggaaagaaagagaaaacgctggtagtgaacccttggctcactcaagttcgaatctttcatcaactcagatacaataagtcagtgcccaacctttgcaaacagatctgcagccacctctgccttctgagacctggaggatacagctgtgcctgtccccaaggctccagctttatagaggggagcaccactgagtgtgatgcagccatcgaactgcctatcaacctgccccccccatgcaggtgcatgcacggaggaaattgctattttgatgagactgacctccccaaatgcaagtgtcctagcggctacaccggaaaatattgtgaaatggcgttttcaaaaggcatctctccaggaacaaccgcagtagctgtgctgttgacaatcctcttgatcgtcgtaattggagctctggcaattgcaggattcttccactatagaaggaccggctcccttttgcctgctctgcccaagctgccaagcttaagcagtctcgtcaagccctctgaaaatgggaatggggtgaccttcagatcaggggcagatcttaacatggatattggagtgtctggttttggacctgagactgctattgacaggtcaatggcaatgagtgaagactttgtcatggaaatggggaagcagcccataatatttgaaaacccaatgtactcagccagagacagtgctgtcaaagtggttcagccaatccaggtgactgtatctgaaaatgtggataataagaattatggaagtcccataaacccttctgagatagttccagagacaaacccaacttcaccagctgctgatggaactcaggtgacaaaatggaatctcttcaaacgaaaatctaaacaaactaccaactttgaaaatccaatctatgcacagatggagaacgagcaaaaggaaagtgttgctgcgacaccacctccatcaccttcgctccctgctaagcctaagcctccttcgagaagagacccaactccaacctattctgcaacagaagacacttttaaagacaccgcaaatcttgttaaagaagactctgaagtatagctataccagctatttagggaataattagaaacacacttttgcacatatattttttacaaacagatgaaaaaagttaacattcagtactttatgaaaaaaatatatttttccctgtttgcctataggtggaggtatcctgtgtgtctttttttacttatgccgtctcatatttttacaaataattatcacaatgtactatatgtatatctttgcactgaagttgtctgaaggtaatactataaatatattgtatatttgtaaattttggaaagattatcctgttactgaatttgctaataaagatgtctgctgaaaaaaaa

SEQ ID NO: 142 - DNA, 493 bp, human
aggacatggggttccagtacagctgtattaatgattaccgaccagtgaagctcttacagtgcgtggaccacagcacccatcctgactgtgccttaaagtcggcagcagccgctactcaaagaaaagccccaagtctttatacagaacaaagggcgggtcttatcattcccctctttctggtgctggcttcccggactcaactgtaactggaaactgtgttgctctaaccctcctccagccctgcagcctccccttgcagtcatcattcgtgttctgtgtataccaaatgattctgttatctaaagaagctttttgctgggaaaacgatgtcctgaaaatggtatttcaatgaggcatatgttcaggatttcagaaacaagaagttagttctatttagcaggttaaaaaatgctgcattagaattaaagcaagttattttcttatttgtataatgacacaaagcattgggagtcagactgcttgtatattatca

SEQ ID NO: 143 - DNA, 4688 bp, human
cgaaagccatgtcggactcgtcgcccagcgcccaagcgctaacccgctgaaagtttctcagcgaaatctcagggacgatctggaccccgctgagaggaactgcttttgagtgagatggtcccagaggcctggaggagcggactggtaagcaccgggagggtagtgggagttttgcttctgcttggtgccttgaacaaggcttccacggtcattcactatgagatcccggaggaaagagagaagggtttcgctgtgggcaacgtggtcgcgaaccttggtttggatctcggtagcctctcagcccgcaggttcccggtggtgtctggagctagccgaagattctttgaggtgaaccgggagaccggagagatgtttgtgaacgaccgtctggatcgagaggagctgtgtgggacactgccctcttgcactgtaactctggagttggtagtggagaacccgctggagctgttcagcgtggaagtggtgatccaggacatcaacgacaacaatcctgctttccctacccaggaaatgaaattggagattagcgaggccgtggctccggggacgcgctttccgctcgagagcgcgcacgatcccgatctgggaagcaactctttacaaacctatgagctgagccgaaatgaatactttgcgcttcgcgtgcagacgcgggaggacagcaccaagtacgcggagctggtgttggagcgcgccctggaccgagaacgggagcctagtctccagttagtgctgacggcgttggacggagggaccccagctctctccgccagcctgcctattcacatcaaggtgctggacgcgaatgacaatgcgcctgtcttcaaccagtccttgtaccgggcgcgcgttcctggaggatgcacctccggcacgcgcgtggtacaagtccttgcaacggatctggatgaaggccccaacggtgaaattatttactccttcggcagccacaaccgcgccggcgtgcggcaactattcgccttagaccttgtaaccgggatgctgacaatcaagggtcggctggacttcgaggacaccaaactccatgagatttacatccaggccaaagacaagggcgccaatcccgaaggagcacattgcaaagtgttggtggaggttgtggatgtgaatgacaacgccccggagatcacagtcacctccgtgtacagcccagtacccgaggatgcctctgggactgtcatcgctttgctcagtgtgactgacctggatgctggcgagaacgggctggtgacctgcgaagttccaccgggtctccctttcagccttacttcttccctcaagaattacttcactttgaaaaccagtgcagacctggatcgggagactgtgccagaatacaacctcagcatcaccgcccgagacgccggaaccccttccctctcagcccttacaatagtgcgtgttcaagtgtccgacatcaatgacaaccctccacaatcttctcaatcttcctacgacgtttacattgaagaaaacaacctccccggggctccaatactaaacctaagtgtctgggaccccgacgccccgcagaatgctcggctttctttctttctcttggagcaaggagctgaaaccgggctagtgggtcgctatttcacaataaatcgtgacaatggcatagtgtcatccttagtgcccctagactatgaggatcggcgggaatttgaattaacagctcatatcagcgatgggggcaccccggtcctagccaccaacatcagcgtgaacatatttgtcactgatcgcaatgacaatgccccccaggtcctatatcctcggccaggtgggagctcggtggagatgctgcctcgaggtacctcagctggccacctagtgtcacgggtggtaggctgggacgcggatgcagggcacaatgcctggctctcctacagtctctttggatcccctaaccagagcctttttgccatagggctgcacactggtcaaatcagtactgcccgtccagtccaagacacagattcacccaggcagactctcactgtcttgatcaaagacaatggggagccttcgctctccaccactgctaccctcactgtgtcagtaaccgaggactctcctgaagcccgagccgagttcccctctggctctgccccccgggagcagaaaaaaaatctcaccttttatctacttctttctctaatcctggtttctgtgggcttcgtggtcacagtgttcggagtaatcatattcaaagtttacaagtggaagcagtctagagacctataccgagccccggtgagctcactgtaccgaacaccagggccctccttgcacgcggacgccgtgcggggaggcctgatgtcgccgcacctttaccatcaggtgtatctcaccacggactcccgccgcagcgacccgctgctgaagaaacctggtgcagccagtccactggccagccgccagaacacgctgcggagctgtgatccggtgttctataggcaggtgttgggtgcagagagcgcccctcccggacagcaagccccgcccaacacggactggcgtttctctcaggcccagagacccggcaccagcggctcccaaaatggcgatgacaccggcacctggcccaacaaccagtttgacacagagatgctgcaagccatgatcttggcgtccgccagtgaagctgctgatgggagctccaccctgggagggggtgccggcaccatgggattgagcgcccgctacggaccccagttcaccctgcagcacgtgcccgactaccgccagaatgtctacatcccaggcagcaatgcacactgaccaacgcagctggcaagcggatggcaaggcccagcaggtggcaatggcaacaagaagaagtcggcaagaaggagaagaagtaacatggaggccaggccaagagccacagggcagcctctccccgaaccagcccagcttctccttacctgcacccaggcctcagagtttcagggctaacccccagaatactggtaggggccaaggcatctcccttggaaacagaaacaagtgccatcacaccatcccttccccaggtgtaatatccaaagcagttccgctgggaaccccatccaatcagtggctgtacccatttgggtagtggggttcatgtagacaccaagaaccatttgccacaccccgtttagttacagctgaaccctccatcttccaaatcaatcaggcccatccatcccatgcctccctcctccccaccccactccaacagttcctctttcccgagtaaggtggttggggtgttgaagtaccaagtaacctacaagcctcctagttctgaaaagttggaagggcatcatgacctcttggcctctcctttgattctcaatcttcccccaaagcatggtttggtgccagccccttcacctccttccagagcccaagatcaatgctcaagttttggaggacatgatcaccatccccatggtactgatgcttgctggatttagggagggcattttgctaccaagcctcttcccaacgccctgggaccagtcttctgttttgtttttcattgtttgagctttccactgcatgccttgacttcccccacctcctcctcaaacaagagactccactgcatgttccaagacagtatggggtggtaagataaggaagggaagtgtgtggatgtggatggtgggggcatggacaaagcttgacacatcaagttatcaaggccttggaggaggctctgtatgtcctcaggggactgacaacatcctccagattccagccataaaccaataactaggctggacccttcccactacataatagggctcagccaggcagccagctttgggctgagctaacaggaccaatggattaactggcatttcagtccaaggaagctcgaagcaggtttaggaccaggtccccttgagaggtcagaggggcctctgtgggtgctgggtactccagaggtgccactggtggaagggtcagcggagccccagcaggaagggtgggccagccaggccattcttagtccctgggttggggaggcagggagctagggcagggaccaaatgaacagaaagtctcagcccaggatggggcttcttcaacaggcccctgccctcctgaagcctcagtccttcaccttgccaggtgccgtttctcttccgtgaaggccactgcccaggtccccagtgcgccccctagtggccatagcctggttaaagttccccagtgcctccttgtgatagaccttcttctcccacccccttctgcccctgggtccccggccatccagcggggctgccagagaaccccagacctgcccttacagtagtgtagcgccccctccctctttcggctggtgtagaatagccagtagtgtagtgcggtgtgcttttacgtgatggcgggtgggcagcgggcggcggcgtccgcgcagccgtctgtccttgatctgcccgcggcggcccgtgttgtgttttgtgctgtgtccagcgctaaggcgaccccctcccccgtactgacttctcctataagcgcttctcttcgcatagtcacgtagctcccaccccaccctcttcctgtgtctcacgcaagttttatactctaatatttatatggctttttttcttcgacaaaaaaataataaaacgtttcttctg

SEQ ID NO: 144 - DNA, 134245 bp, human
gatctgtctgaagttttatgcaggggtggggaaaaatgattccacagagcttgtgatgtgaaagaattatattgctttctgcttacaccctactgtgtctagctcattcaataaactagtttatataagtgctacactatatgtatagtcaaggttcagtgagtaggtagcacatagaagaaagtaataaactctttccagggaggccaggggaaggcctgacactttctctcagaggagttagtgtttgaactgggtcttaaagaataagaaggaatttcttaggtgaggatgaggcaggaggacatttcagaaagagggaacagcatgtacaaaagtaggaggtgtatatgggtgattgcatgtggtttggtgattctgaatcattgtagtgtaaactgctgttgggtggggagggaggtcatacttgcattttaaaaggtcacttttgtcacaatgtgttaagtgggatagtgagaattgtggagactgggaaacaatgtcaggttaacccagacaaggagagctcttggttatctagaaatatcctaataatagaccgatctacatttaagaacatttgaagccaggcaatgtggtgcctgcctgtagttccagctactctggaggctgaggcaggaggactgcttgagcccaggagtttgaagctgcaatgagctatgatagtgccactgcactgcagtctgggtgacagagcaagattccatctcttaaaatttgttttcatctaaatatagtagattcccagcttgagttctacctgggaattggacctgtctgggattattcaatgaaccgcagggatgggcagccatgtcttttagcatcaggtcctgtaaggtccccctaaagtgagctcattctaagccagtggtccttaacctgaggttcacaaatagaatccatggggtctgtgaacttggaagggaaaacaattacatctttgaaacttagtgctttcccctaattatgaacatacacagcaaactacagtggcattagccatatctgtgaccctgtcatggatagaaatcacagacattttcatatcacgttgcatttttttcagatgtctcaaaatagtatttactcaggcattgctttgagttattgcggtgttagacctgctgctggatcatttatttaatgtgttaataaaaagcatacatgttatataaaatttgttctaaaaatagtttgataactattacaatgtaacgggtttcctttgtaatcctatgtattttgttttatgcatttaagaacattagtctgagaaagggtccatggggttcattagagtgccaaagagttgcatggcacaaaaaaatggtaggaacccctgtttaaggaaaaaaagaatcacccaaatttgtctccctgtccacttacacgcaggactgagtagctgatgatgaaaagggatacctgcatgctccctgtgagaaagaggcttctgttaacttatactatccgcccttcctttttttcagtaaaaaaagataatagagcataagcggccttcttccccacttttcagcagagcaccacgcagatctgccatctctaggctcctcagctaaagcaagacatcaaggagcctggtaggagatggcaggagatgcctaatgggggacagtgatgcctggctgatgccataatgtccagctaagagagtgaggaacagaggtggaggcagaagaaagaaatggcagaaaccgcatcgtgggtgataggacagctggttagactagtttgtgcttgcaggtgatatccactccctaagaatgcctggagacactctggagggcttttaattgaagaagccctcgacccacgacaggttgcggggtgtgatgttccccgccctgtgtccaagtgttctctttgtttaattcccacctatgaatgagaacatgcagtgtttggttttctgtccttgtgataatttgctcagaatgatggtttccagcttcatccatgtccctgcaatacaaaaaacagtaaaatttggtgattccatttaatagaaccccttttactatccacaggctagagaaacctgaagaaatttgggttccaaagctatttgttgtgggagtgacagcctgattatactggttttattactttttatataaaaaagcaaaaaaacaagtgagttctccctttcatgttcaatattccattagttgaacatcctctacgtgtgttcatagaaatattttatgtcctgagaataacttcagaggttgagagcatatcttccccagcgtttgctttagagcttacttgaataatcagctccctgctttcagaacaaatcttagttttcatgaacagcagtatcatcagtcattcattgatggatatttgaatggaaaaagtgccaggtgtttcaacttcctctccagcaggtttacaattaagctgttagtagtttgttgttggtttaaaaaaatttttggtttgttttatgcacagaaaaggaattcccataatccatcagatggagatgtgctgctggaaatgctgctaccttgtgaccaaaataaataaataaacaaaaataaaaataaaaataaaaaattgctgggttaccatcagctgtgtccattcagatttatcaatcataaattgaggttccttgcattacaaatgtgggctattcttttttttattattatactttaagttctagggtacatgtgcacaacgtgcaggtttgttacataggtatacatgtgccatgttggtttgctgcacccattaactcgtcatttacattaggtatttctcctaatgctatccctccccctgctccccaacccacgacaggtcccggggtttgatgttccccgccctgtgtccaagtgttctcattctcgttgttcaattcccacctatgagtgagaacatgcggtgtttggttttctgtccttgtgatagtttgctcagaatgatgctttccagctttatccacgtccctgcaaaggacatgaactcatccttttttatggctgcatagtacttcatggtgtatatgtgccacattttcttaatcagtctatcattgatggacatttgggttgattccaagtctttgctatcgtgaatagtgccatgaaaaacatacgtgtgcatgtgtctttatagtagcatgatttataatcctttgggtatatactcagtaatgggatcactgggtcaaatggtatttctagttctagatccttgaggaatcgccacactgtcttccacaaggttgaactagtttacattcccaccaacagtgtaaaagcgttcctatttctccacattctctccagcatctgttgtttgctgactttttaatgctcgccattctagctggcgtgagatggtgtctcattgcggttttgatttgcatttctctgatgaccagtgatgatgagcattttttcatgtgtctgttggctgtataaatgtcttcttttgagaagtgtccgttcatatcctttgcccactttttgatgaggtttttttcttctaaatttgtttaagttctttgtcgattctggatattagccctttgtcagatgtatagattgcaaaaaatttctcccattctgtaggttgcctgttcactctgatggtagtttcttttgccatgcagaagctctttagtttaattagatcccatttgtcaattttggcttttgttgccattgcttttggtgttttagtcatgaagtccttgcccatgaaatgtgggctcttctttaaaataggccatgttattaaatgaaatgatatgcaacacgtacttagaacagtgcttgttgctacacagcaagtgcttgataaatgttagctatcatcatcatcattgtcatcatcatcatccagcccaagaagtgcatatttaaatatacaccctaagctgttgtctttctatatagattatatgtgtgagcagaggggcagtgaattaaagtgataaagaatgtgtcctcacttaggtgtgtgctggctttcttgcaaattcctatggaaaaggagataaactaaagcctcagtttgcttggcaagagcttaatttgtttacgagagcattcgttaaacctttttctgtggaaaattagtcctgcaagatcactaagtgaaaagtgatgccttcctgaataagtttataaagttctccctgtaccccaccttggagggtcatatgtcctagagtacattaagcaagctgagaagtcccccagaaaaaaaggctatttaattttttaaactcaatttgacaaagttccttgactacataactcctttttgttgtaatacttcttaatatccccaggcactggtgttttacatgtagtgggatgtcctatcagagatgattatcttttttcctcttctgagaaaggaattgccagtcactctccatacaggcagagtgacaagggcatcttggaacaggtcttcaagaggtcatcttagttatccagtgttcaccagacagatgtgcatatgcctggagagagggtaggccattcaccatacatccatggaaagaacttccaatccatttgttgagacttggagttaggaggaatgatcaaggtagagagggccattcttttcaaggcccaatgtcaggaaaggacaatagtatccataaaatagtgtgtcaaaaaaacagagtgtggtctgtctggtgggctggctctggtactgagtaaagaggaagaaaggggatggtggtgggattgactatataatttacagtgcccagtgcaaaatgaaaatacagggacccttgtttaaaaattatcaagaatttcagggctgagcgcggtggctcacgtccataatcctagcactttgagaggccaaagcaggtgggtcacctgaagtcagggatttgagaccagcctggccaacatgtcgaaacctcgtctttactaaaaatacaaaaattagctgggtatggtggtgcatgtttgtaatcccagctactcgggaggctgaggcaggagaatcacttgaacccaggaggtggagattgcagtgaaccgaaactgcactactgcactccagcctaggtgacagagtaagactctgtctcaggagaaaaaaagtatttcaggagagcaatagtagagcattaagccaaatatggggcccttccaaacacagtgctctctgtgactgcacaggttgtatactcatgaagccagccctacattgtggtctttggttttctgagtctgtacacaaaagaactgcctggaagtggctctactaggtctatattaagaccttcagaagtaattgattgtgaagtgagattgctggtcactaagagatgtaatgagatgcactgagggacttctggtcctaaaatggcagtatagaggcaacctggcttcactctcccacacagaaaaacaaaaacagatataaaacactgagattttaccagcaacaatccagagctcaggtatgaggacaagacagttcccagggccaccaagtagtggaaaaactctaagtagttggtggtaaaatcagactttcacatctgtgattcctccccaccacccaattctgccaggcaccaagtgtgtggaaaatctccctccaacttatggtttctatgctggaaaaagtgaaattgaggtggtgaactagcttcttcactttcttgggttccctggcaggagacctgtccttgccttaacctaagagacacatcttgactgcctgaagggagaaatatcattgaggacaggcagagcaaggagaggtggggctaccatcttcagccctggaaactctgctctgtagctcaaccaaaggagataccaaatcagagtagctgttcagcagcaccacactgcaggaagtacattctccaggtcccctgggcatgaaccattagccagacttcccatactgctgggataatccctttgggacttccccatttgggacaggcagtgctccaatcatttactagagctgaggtgaacctggggttaaggtgccacctagaactgaaaagaaggcagtggcctagtggcaaagatttgctaagcaaacatattcaaaaggaaaacaaaacaagccagaaaaagaaaactggaataaataaacaatcattcaatgccaagacataaatgtatacccacaaaaaacaatagcaaacagggaatcatgacctccccaagggacaaagcaaaactccaatgactgaccctaataggatggcaatttgtgagctctctgaacaaggattcaaaatagcagttttaaggaaactcatagtgagctccaaggtaacacataaaaacaattcagaaatttagcagagaaatttaacagagattgaaattttaaaaaaatcaaacaaaaatcttggaaatgagaaatgtatttgctgaactgaagaactctttagaggctctagacagcagaacaagccaatcagaggaaataattagtgagctcaaagaaaggctatttgaaagtgcaccatcagaagagaaaaaagaaaagagaatgaaaaggaatgaagactacctataaaatatagagaattatctcaaaacaccaaatctaaaaattattggtgttcaagagaaagcagagcaagaggaaagtgtagaaagcttattcaaataataacagaaaactttccaaaacttgagaaagatataaatatctcggtacaggaaagtcttagaccactaagcagatttaacccaaataagactgccccaaggcagataataatcaaactctcaaaggtcaaggacaaggagaagatcctaaaaacagcaagagaaaagaaataacatataatggagctccaatttttctggcatcatacttctcagtggaaaccatatagacaaggagagagtggaatgacatttttgaagtgctcaaagaaaagaacctgccatccaagaatattgtatccagcaaaattattcaaatatgaagagagataaagtctttcctagaaaaacaaaagctgagagaattcaccaccaacagatccatcttgcaagaaatgctaaaagcacttcttcaatctgaaagaaaaaccactgatgtgcaaaagaaaacatttcaaggtataaaacccactggtaaaattaagtacataggtggcccggcacggtggctcacgcctgtaatcccagcactttgggaggccaaggcaggcagatcaggagttcgagaccagcctgaccaacatggtgaaaccccgtctctactaaaaatacaaaaattagctgggtgtggtggtgtgtgcctgtaatcccagctactcgggaggctgaggcaggagaatcgcttgaacctgggaggtggaggttgcagtgagctgagatcgtgccactacactgcagcctgggtgacagagcgagactctgtcttaaaaataaaaataaaaataaaaaaataaaaaaattacataggcaaacccagaatactctattgctgtatttgtggtgtataattcactcataaccctagtatgaagcccaaaagacaaatgtatcaaaaacaataatagccacagcaacctattaagagataggtaacacaaaaatatgtaagttgagacaactaaaagtcaaaatggggggaaattgagttaaactgcagaatttctttgtatttttttgcctttgtttctattatttgtgatctaagataagttgtcatctctttaaaataatttattatgtttataagatgttttttgtaagcctcttggtaaccacagcacaaacatctgtaatagattcactaaaaataaaatgcaacatattaaaacatactaacagataatcagccacaaaggaagacaggaagaaaggaggaaaggaagagaggagtctcaaaacaaccagaaaacaagcaacaaaatggcagtagtaagtctttccttataataataacactgaatataaattgtcttaattctccaatttaaaaaacgtagagttactgaataaagaagtaagacccaactctatgctgcctttgagaaagccacttcattgataaagaacatatgccgagagtgaaggggtcaaaaaaaatattccatgcaactggaaaccacaaaagagcaggagtagctatacttacatcaaatcaaatcaaagactgtaaaaaaaaaaaaaactacaaagaaggtccctatataatgataaagaggtcaattcagcaagaggatagaacaattataaatatctatgcactcaacactggagctcccaagtatataaagcaaacattgatagatctaaagggagagataggttgtaatataataatagtaggggactttaatatccaactctcagtaatggacagatcagacagaaaatggacaaaaaaatagcagagttaaactacatactagatctagtagcctaactgatatttcacattcttttcatcagcctgtgaaacattctctagaataggccatatcttaggcttcaaaaacaagtatgaacaacttataaaaaataaaagtcatataaaagtcatatatcttttctgaccacaatggattaaaactagaaatcaataacaagaggagccttggaaaatacacaatgcatggaaattaaacaacatactcctgagtgatcaattggtcaaggaggaagtttaaatttaatttttaagaaaagaaatttaaaaatttcttgaaacaaatgaaaatggaaatacgacatacccacatacccaaatcagtgggatatggcaaaagcactgctaaaagggaagtgtatcgcaataagaacctatataaaatagtggaacgacttcaaataaataacctaacaatgcatctcaaggaactagaaaagaagaacaaaaccaaacccaaaattagtggaaagaaagaacgaataaatatcagagcagaaataaatgaaattgaggctaaaaaaataatacagaagatcactgaaatgaaatgttggtttactgaaaagataaacaaaactttagcaagactaagaaaaaaagacccaactgaaattggaaacaaaaaagaagacaaaacaactgagacatcagaaatacaaagaggccaggcccacggtagctcacacctgtaatcccaacattttgggaggccaaggtgggtagattgcttgaagtcaggagtttgagaccagcctggccaacatggcagaatgctgtctctacaaaaaatacaacaaaatcagctgggcatgatggcacacctctgtaatcccagctactcaggaagctgaggcgtgagaattgcttgagcctgggaggcagaggttgcagtgagccaagattgtgccactgcactccagcctgggtgacagagggagactccacctcaaaaaaaaaaaaaaaaaattgaagaaaagggactaactccaagctcattctatgaggtcagcattaccatatcaaaaccagacaagggcacaacaaaaaaagaaaactacaggccaataccactaataaacatagatgcaaaaatcctcaacacaaatactagcaaactgaattcaacaacacattaaaaagatcacttaccataatcaagtgggattcatccagggatgcaaggatggttcaacatatgcaaatcaataaatgtgatcaatgaatgtgatacagagtcgagaataaaaaccatagatgccgagaaagtatttgataaaattaaacatccctttatgataaaaaccctcatcaaaatgggtatagaaggaatgtatctcaaaataataaaggccatatatgacaaacccatagctaacatcatactgaatggtgaaaaatcaaaggccttttctttcgaggactggaacaaaaacaaggatgctcactttcaccattattattgaacataatactggaagttctagccagaacaattagggaagaaaaaaaaaagtgatccaaattggaaaggaagaagtcaaataaccgttgttcacagatgacatgatcttttacctaggaaaacctgaaaactccacaaaaaaaactgttcaaactgataaatgaattcagtaaatttgccggatacaaagtcaacatacaaaaatcagtagcatttctttctttctttctttttcttttttcttttcttttcttttctttttttttctttgagacaagagtctcactctgttgctcaggctggagtacagtggcatgatctgggctcactgcaacctctgtctcccgagttcaagtgattcttgtgtctcagcctcccgagtagctgggactacaggtatgtgccactgtacccagctaatttttgtattttttggtagagatggggtttttccatgttggccaggctggtctcaaactcctggtctcaagtgatccacccgcctcagcctcccaaagtgctgggattacagatgtgagccaccatgcccaacccaaaaatcagtagcatttgatatgccaacagtgaataatctgaaaaagaaatcaagaaagcaatcctatttacaacagctacaaaaatataaaatacctaggaatcaatctgaccaaagaagtgaaagatctatacaaggaactataaagttctgatgaaaaaaaaaatagaagaagacacaaacaaatggaaagctatttcatgctcatggaatagagaattagtattgtttaaatgacaatactacccaaagaaatgtacagattcaatgcaatccctatcaaaacaccaatgacattcctcacagtaatagaaaaaaaaatcctaaaatttatgtgaaaccacaaaagatcgcaaataatcaaagcaatgctgagcaaaaagaaagctggaggcaccatactacctgactttaatgtttactacaaagctacactaaccaaaaccgcatggtactggcataaaaacagacacatagaccaatggaacaaaatggagaaccttgatgtaaacccatacatttacaagcaactcatcttcaacacaggcaccacaaacatacaagggggaaaggacagtcttttcggtaaatagtgctgggaaaactggataactatatgcagaagaataaaactagatccctctcttacatcatacacaaaaataaaatcaaaatggattaaagacctaaatctaagacctgctaaattcaactactagaagaaaacattgggggaaacgctctaggacattggtctgggcaaagattttttgtgtaagacctcaaaagcacgggtgaccaaagcaaaattaggcaattgggattacctcaagctaaaaagctttgcaaagcaaaggaaacaatcaacaaagtgaagagacagaccacagaatgggagaaaatatttgcaagctatccatttgacaagggattaattatcagaatatataaggagctcaactcaataggaaaaaaacgaataatttgatataaaaatgggcaaaagatccgaacaaatatttctcaaaagaaaacatacaaatggccaacaggtatatgaaaaaattctcaacatcaccaatcatcagacaaatacaaatcaaaactacaatgagataccatctcaccctagttaaaatggcttttatgaaaaagacaagcaataacagatgctggcaaggatatggagaaggggaactcttgaacactgttggtgggaatgcaaattagtacagccactatggagaacagtatggaggttcttcaaaaaactgaaaatagaactaccatatgatctagcaattccactactaggtatatatccaaaagaagggaaatcagtatatcaaagatgtctgcactctcatgtttatcgcagcactcttcacaatagccaaaacatggaatcaacctaagtgcccatcaatggatgaatagataaagaaaatgtggtatatatacactatgggatattattcagccataaaaataatgaaatcctgtcatttgctgcaacatggatgcaactggaggccattatgttaagttaaataagccaagcacagaaagacaaataccacatattctcacttatatgtgggagctaaagaaaatggatctcatgaagatagagaatagatttgtggttacaagaggccaggaagggcagggaggggggatgaaggggacaaaaaagaatataagtgtatttattaccactgaactagacacttaaaaatggtaaagatactaaattatatatgtatattttgcttaaataaaaaatgcattgaaatcaatttcttgcagcagcaacccaatgttttaaatttttattgctgctataacaagttatcacaatcttagtggcttaaaacaacataaatttattatcctatatttctgcagttcagaagtttgaaataggtctctggctaaaatgaaggttttggcagggctgactttaggtgagaatccatttccttgcctttcgcagcttctacagaccactttttttcttagctcgaggttcctttcctccatcttgaaagccggtaatgttgcatttctctgtgtctgtactcacatctccccatgactctattattttttcacttttaaggacattgggcccacctggacaatccaagatagcctccctatctgctgattagcaatcttaatttaatctgcagtagtaattttccctttccatgtaacctaacatgttcacaggttccaaggattaagacatctctggggaccattattctgcctaccatactcagagataaccgagacaaactggaccttgactttaaaacagattattggagtataacatataaaatgtgctcaaatcttaactgtacagcttgatgaattttcccatacatatataactatttaatttgtaaatgtacacctgtgtaaccacaactcataccaaggaatgaaatatatccagtacttcaggaggcttttatgtgctcccactcagccactatccatcccccagcggtaactactattctgtcttctatcactgtatcagttacctattagaaagcattccaaaacttggtggcttaaaataacaaccattttttttggcttctaattctgtgggtcagaattataggcttggctcagctgggcaattcatctgctggtctcacctgaggccacttaggtgattgcagtcatttggcagcttgactagggctggatggtctaatatggtgttatgcatatgactatggttggtgctggctatcagctgggcctctctccctccatttgtatgcttaatcctccaagagggtagagtgggctgctttacatgacgatctcagggcagcaagagggcaagagcagaagaatgctcagaagttgtacaatgtcatccctgctgaattctactggtcaagtcacaaggccatttcagattctaggggtagggaataaactcgcttgatggcaggagctgcagaaaagcttgtggttatttaaaaaaatccacctcagttactgctgtggcttgatgggtgcccccaaaagcatgtgttggaaactgaatccccaatgcaacattattaggaggtagggcttaatgggaggtgtttaagtcatgagggcttcaccttcatgaatggattaatgccaattataaaaggggttgaggctgagagtttgacctcttgctctcttttgtcatgtgatgccttctgccatgttatgatgtagcaaaaaggccctcatcagaagctggcaccttgattattgacttcccagcctctggaactgtaaaaaatcaattttcgttctttacaaattacccagtctcacgtattctgttatagcagcccaaaatagactaagataattaccatatgtgtttcctgttcttgaatgtcatataaatggagcatactgaaagtactgttaggtctagcttcttttgctcaacattatgtgagattcaaccatacttttgtatgtgacggtagttctttttttaaattgctgcttgtcatattcaattgtatgactataccactatttatccattctaccattgataaatatttgacttgtttcctgtttgtggctattataaataattctgctattaatattcttgtgcatgtcttttgaagggtatatgtactcagttatcttgggtatgtatctagaaatagaattgctaagtcagagggcaggttaataagcttcagaagatattctcaagtagttttcttaagtggttgtactattgtacagacctgtcagcaatgtatgagagttttgtttgtcccatatccttgctatcacttgatactgtcagccttttaaatttcagccattttgatagatgtttaatggtatctcattgttttcacttgcatttccctggtgactaatgatgttgaacacattttcacatgtttaatggccatttggctatgttttgtgatgtgcttattcaagtggttgtgtgaaatgccagttaaaaaactgagttacttgtctttttcttgatttgtagcagtgttttttctagagtctacatatgagtctgtaattgtatatatgtattacaagtggcttgtcttttccttctcttaattgtgtcttttgctgaaaagaagttcttaatttgaacaaagtccaatttatcaatattttcttctatgataacaactttttgcattctgttttgaaatctttattccagtggaccttgattttaagagttttatagctataactattatgtttaagtctttggtccattttaaatttagtttttttatatggtatgaagtagggggtccaaatttattctctggtatgtggtgtttcagcagcatttgttgaaaaaactgtttttccctattgaattgccttggaacaagacaagtccttttctgtccctttagtgggagtttctatttcaaggacaccaactatctttgtcttggatcatcattgtcctacatatgtgttattttctaattactttaatctcattgacattatttttttgaatttactgtaattatctcaagttttactttatgccataatttgattttcagtaatatctattctggtttcttgttatttttgatctatttaatagatctgttaaggtgcctttttttttcttttttttttcttctgtaatctcccctttctgctttttctgttgttatattatttgtctttgagcccttggtttattaaattaatattcttgttaagttcttttatagcacaacaatcctgtggggaatatacctctattctttgaattatgttatttttatcatctggattctttttccatgatatttgttttcatttttgcagagttaacttggttatgcctaatgtgaaaagcttcacttagctcttctatttgctctgacagagtttaggtacattctccttggcaaccttcccaccttatctgggataattttgtttctccctaggagttagaatttggaaaccgagtgctgctttcaatttgcctttaggccttctggtttctggtaatggtgaataagtttattcagatcaattctcccactgaaaacaacaaaaaattttggatacagtattaatgatggcttctcaaaagcactgaagattgacaatatagtaagaagttaccatgtcaaaaatgaagaaaaggtggtaaagagcaaggaaactcaccattattaacatacaatatagacattaaggtaaaatcattactagaggtaaaattattactatgtttgaaatttttatacaaataaatgttttgatttgccagaaagacataacaattaaaaatttttatgttcctaataacataacttcaaagtataaaagcaaacattgagagtgcaaggagaattaaacaaacccacagtcataatggtagatttcagtatacttccttcagtaattgacaatacaggcaaaaaagattctctctctgaacaacataatgagtacattttttaaaataaatcttttattttggaatagctaaatatagagaaaaattgcaaagtagtacaaggaggtcccatattctcttcaccccgcttcccctgatttgaacatcttaagtaaccacagtatatttgtaaaaactaagaaactaactaatgtacagactttattaaaatttcactagattttctactagtgtctttttttcttttccagtaaccaatccaggatatcacatttcatttggctgtcatgtctccttttcttctctgatctgtcacagtttctcagtctttctttgtttttcatgatcttgccaatttcaaatggtcaggtattttgtagaatgtctcccaatgtgggtttgatgtgatgttttctcatgattagtgtagggttatgagttattggtaagaataccataaaggtgaagtacccatctcatcacatcatccatagaagtgaagtacccatctcatcgcatcatatcagggggtacattatttcaatatgacttctcactggtgatgttaactctgatcacttggttagggtggtgtctgccaggtttctctactgtgaagttactatttttccctttccatactctattctttggaattgtgtcattgatctcagcccatattcaaggaatggacagttacgctccccttactttagggtggagtatctacataatttattttgaattcttttgcataggagatgtgtacatttcccccatctatatatttattctatcatttatttatatcagtataaactcttattttattctttgtgttataatccaatattatagttattaattttgttgctcaaattgtacaatgaacaaatttgacttcataaaaacgatatagattactatgccaaaagcatcagaattaaatagttttcaagcacacataaaacatttatcaaatatgaccacgaactgggccatgacagtcataatgcatttcaaataattgaaatcatgtgtgtgttttccaacttcagtgcattaaaatagatatcaataataaaaactagaaaatccccataattttgacagtaagaaatagatttcaaaataactcttgtatcataatggaaattaggagatattttgaactacgtgacaatggacatattacatattaaaacttgtggtatgcagtaaagtactacctgaagggaaagctacagccttaaatatctatattaaaaagaagaatggttcgaatttaatgaacaaagttcatgacgttaaaaaagaaaaaacccaaagatcatagaaagaagaaaacaaaaaaggtaatgtaaaagacaaaatgcaccagataattaagaagatgacttaaatcaggctattgaaatccagtgaatgtaccttagtgaggaatgtctcaaacaaaaggaagggagcctggaggttttaatagaggcagataaacaaggaaattggaagtaagtcttatgggacatgaggaggatagagatgggtcttttctgcattgcggaagagtgcaggtgggtgttttcttgggttatatgacagcatggtggtcctttacaagttagccagagcacagaagggtgggagtacatggctcacataatgttcaacattgtcagtaagaacaaaaatatacagtagactttggggacttgaggggaagagtggcaggcggggagggataaaagactacaaatatggtgcagtatatactgttagggtaatgggtgcacaaaaatctaacaaatcagcactaaagaatttactcatgtaaccaaataccacctgtaccccaataacatacagaaaaaaagtatatggaaatgcaaaaaaaataataaaaataatatcatttctacttcaataaaaaaaagaacagaaattagctgggcacagtgactcacacctataatcccagtactttgggaggccaaggtgggcagatcacctgaggttaggagtttgagaccagcctggccaatactactaaaaatacaaaaattagctgggtgtggtggcacgcacctgtagtcccagctactcaggaggctgaggcacgagaatagcttgaacccaggagacggaggttgcagtgaaccaagatgacaccactgcactccagcctgggcaacagagtgagaatctgcctcaaaaacaaaacaaaaccaaacaaaaaaaaaaaaacaaaacagaaattaattaaatacaatacaaaataataatgcaacagagtggaccagcaaaagtcattccttctaaatgaaatggagaaatctctaccaagaccgatgaagacaataagaaaatgtctaattaatatcagaaatgaaaaatgtggtatcactacttatgctacagacattgaagagatgagtatattataaatgagtatattggaaaatttagataaagtttaaaaattcctagaaaatattatataacaaaatggactcaagaaaaattaggaaattttacttctattcactgtcacagaccacatctgtataattggaagaaaattactgaaagttgccagacttttgtcgagactcctttcctcagtattaattatgaaagtgaaggtgggtttagaggtatcataaacttttttctcctggttcttttttgtttaaagtttacagcataaggtgttttcctttccttgtctggctgctgttgataaatttgggcagctaaaaaaagtacttttttcttaatttaattagaaatcttaacacagaatacaacaaaatgaaacaattacatgataaaccccaatcttttttttaaagttcagctttttattgaacacattataaaagaggtttagtcaaaaagaccaaagcccatgtcatcatcagactcctcagattcttctttctttgcttccagtttcttctcctcagctggcagtcctttggtaaaagccaggtacatattctatggtagtgcagccacatatattgctttctaatagtctaattaatatatgattaaagaagagaaaaatctggaatagtgtgcatggtgtgtggtcagaatacagctgatacaaactctgagttcacagatcaactgtatctggatcatctggtgagcattttgaggtcctactcttttttttttttctttgagacagagtcttgctcttgttgcccaggttggagtgtaatggcatgatctcggctcactgcaacctctgcctctcgagttcaagcaattcttctgcctcagcctccagaatagctgggattacaggcacccaccaccatgctcagctaattttttgtattttttagtaaagacggagttttaccatgttggtcaggctggtctcgaactcctgacctcaggtgatccacctaccttggcctcccaaagtgctgggattacaggcatgagccacctcacccagccatcccattcttaaagagtctaattcagtagatctgggaccacaccttgaaatctgcattctataagcctattgggtgattgtcatgggcagttggcttgggaaccaagccaagagagagaaccatcttgttttccctctcttaggcatcaattgtcttaactgtgctatcatatttaagatggccctgtttagtaagttccaagaatacagaaattctgtatttgtagtcagattgaaatataatcttgtaagacttttctggagaaaaatttagtaatatataataagattgtagatgcatgcatggggaaattccacttctaagtatatacttacagatgtatactaccagtcatgtacaatgttgttaattgcaactgttgctaatgatgataatactggaaataacataactgcacattcaaagagtgaacagcagttaaaatgaatgaactaacctacagttatcaacataggaagatatggaaaatatcatgtaaagtgaacaatgcaaatttgaaaaagttgatattgtttaccacagaggtaatactacataatgtttatagataaatacatatctataaaaacatacacagcaaggtatatggcttgggttagttttgaggatggaaggcacaagggagggaaggagaaaatatgatacaggaggactttagttgtatcactaacatcaaatttctttaagtaaaaagttctaaagcaagtatgacaaagtgttcacaacactgttaagtccaccacttcctagctgtgtgatcttgggcaaattacttatgcttaacctttatgagccccagtgcctctgtctgtaaaatgggttgataattgtacctttaatacatggagttgttttgaggattaaatgaagtaaaggcattttttgtgtaataaccccatagtaaacactccctaaatcatggctgttatcatgagcaagaaagtgtcaaaagcatacattcagatgtgggtcagtaaaggcagatgggaaaaggtacattcccaagagagatgacatatggcactttagagtagaagcacctctggtgagggtacagggctctgagtgtgcccttgggcagagagcagggctgatttttttttttatttttctcctctattgggtgcagtgtctgtctcctctaagttgtatgtgtgtgtgtcaggggcggggattatatttattatgggagtgagtgatgagtgcctttacctggcacaaggcactgtgtgatctggattcttctaaactcaaatcccaaatttctaaagaatggggtggcaccttcagagagtggtctgctttctagacactgccttgtggaaagcaagataataatggagtgcggattccaggcactggacaaattggtgacaaagtcaccatcctctcttcttagccatgagtgaagtctgaaaggaaaattgatttcttctatcaatggcttttgggcctgtcctccttagattaggaaattttgataaaatcctactggatctcactgtctaatagcaatctgtacctcattgctcaaggctcaagacagtggtggaaaaatgacaatggtagctcaagtggcatttcaaaaagagattgtggggtggtgtggggttgggcttgtcagtactatcctcaccagtgcaaaatagatgctgacttcacctcttctggtttattcaattgtcagatatagcctactggaccttcaggtatctagtgctttcagaagtcaccctcttgccattagatcaaaaccagagtagcagtcattttatactcctagtatcgatgtatttatattaatttttgtaagtggcgctattgataggctatttctaataattgccaagccaaaggggcctgtcagtttcctccaattcaggtccagcgatttttcttaaaggttgtttcccccagcctttctgtaccagtcagtctatgctcatcctggggtaactaactgctcatagatctgcaacctacttggttcttccctttatatttcagcctcctaccttctgccccaaccttaagactctcagatccttggggattcagcatacattctcctttgtttcataccccttcacttggctgatgaatcatctgcccctgcccttccctccaagagtggtgatctaagtctgacttgccagccagttagttggctagagcttaaatgtcccagagttcctgcttccttgagtcctccaggccacattggcatgtaagcagacataagagattgtgtgtatgggtgtgtttgtggtgggggtggaggtgggaggtgtaaatttgtgaatggtttccgtgagaatattcaatagggatgttacttacagatactaaagggctaacaagaagaaagaaaatacaaaaaccgtttgtctatggaaaacaaatttatgtctgcttactctttatggctaattttaccacatacacaataataaccatgagtgttgtcaagatgggtctgatgaaattgattgtaaagtatattcacttacaatgtgccattgtgctcagctgtgctcacacttgcgttgattattgactatgggcttctgcccatgtattctgctcacatggaaaaaaaaaattaaggggatgtgactctagtctttttgagattaactgcctagctgcctcctttcttttcttttggcatctgttgggtagctgtattgaatgggtcactgtgggtacaaagtacaagaaaagaaagtatatgtaataaaaggtgtaaattttcctaaagcggcatgaaaattgttcctcagtactcagcatatatagcttatatttactccatatgccttttctctattctgtttaccacctttgattcctaggagattaaatctgcacaaacgtagatacatactaatactatgaactttaaaatgttattttccttcctttatcatcaatgattatcatttagagttgttatgaaggctttgtgacagaggttatactaaaattgaaagtataagaacttactgaaaatcatgtaaaaattagctatgtttttaatgtggtttctcagattgattaatttatgcaattgaattgttctacctcttgtaaacatacattcacactttgcaaacttgcacacctgcaaagtaaagtgtggtggtatttgtgatattatcattgttttatcaagaatgataactcagccaggttaccctttaaatctcattttataggccattatatatcaccttcctgtctcaatatagtggaaattgattccataaagggctgaaaggccaaaggactttaaagttaataatttaaaaacacattggcatttatgaagtgttgttacattaatttggaaatagtttgaaattgttatgaagtttaacagtatatgaaagcacttccccaaaagatagatacatcagtttggatacagtgaatgcttttctttagggaagtatgtgtctttaaaaaattatttttctctgaattgaaaatatgacaagaatattctcttacagctttcagtctgacttttaaccaagattatagaactcatgaagtagtctctgttttcccctttttctttcctttttcactatcttccattactttgttccctcttcttggcatttataagcaatacatgtaataggaaccatatcaggtgctagaaatccagagatgaaaggccacaatctcggttctcaagggactaagtctagttgaagagaaagaagaataaaaaaactaattacacagtattggtggtgtagtggtcaggaaaaacttcttggaagaggtggtgattgagctggaaggatgagtgataggtgacaaggagataaaattaatcttacttgggatattaatagttttgggatatgatagctctctttataaaaaaaatggcgaagtagagaaattgaggtcctatcccttcataaaagcatctaatggagctggaaaatactgtcagaattaacttttgcggaactctggaatctagtcaaagcgtataacaaccaggggaaagccaaatgaagaaagaagctgctgccttgcagtaagggagttctctggtgtttcaaattgcctgtctccctttccccacacactagattggaggcagccatgaagacagtagcctgtactcctggtacaggatgccatgtgccagatggagcaatacagaccttattctcaaataattgtggttgtgtgttttaatctgtctgatagctccctgaaggacagatgtaagggcttacttctgttttgcccatctgactcagaatttgcagggatggggcagctttccaggtggcatttaccaaaagcatttaaaggcaaaagtattggctgtagcagcctgggacaagggatagcagtcaacacaagcaatagatagaccaaaaatcctgggaagaaagagggtgggaaaaagagatatgtgggagaatgagggcttttaaaacccataatgtaaaccagggaattgagaaagccttgtacatgcccaagactggacatgctcagaaaaggcctgagaagaccctatacttctacttgttgctgactttcaggtttgccacaagcaggaagtaaaggcaaaggaagtaaaggcaaacgcagcattataaatgatctgggtaagcattaaaggagtttcccaaaacagagtcaatatatggtgctgttcctgggttcctgggtgcttgaacccgtctcctgggttcaagcaattctcctgcctcagcctcctgagtagctgggattacaggcactcgctgccacgtccagctaattttggtatttttttttttagtagagacgggtttcaccatgttggccaggatggtctcaatctcctgaccttgtgatctgcccacctcagcctcccaaagtgctgggattacatgcatgagccaatgcacccggccttctttctcttttcttaaaaaaatatttttggggccaggagtggtggctcaagcctgtaatcccagcactttgggaggctgaggcggatggatcacctgaggtcaggagttcgagaccagcctggtcaacatggtgaaaccccatctctactaaaaatacagaaattagccgggcatggtggtgggtgcctgtaatcccagctaatcgggaggctgaggcagaagaactgcttgaatccaggaagcagaggttgaggtgagccgagatccctaacactgcactccagcctgggcaacaagagtgaaactccgtcaaaaaaaaaaaaaaaaaaaaagtaagttacaagccaaaaatacgttaatcttgtcttgtgtatttacctacattgttatctttaccgtgtggtttttgtttgaattctagttactgtctagtgcagcccagaggactccctttagcatttctcctagggaagatccagatcatggacgagcatttagccaaaaggaaaaagagataccctctgagatctgggttgaccagataaagatggaaatgaatttacaggaccttcatggctcaattacttgcttttcttgatgacagggactctaagttcacctgttcaggagctaagggaagggtgcacatagcatgactaactctatggaatgtttgaagtagtaattgagagtacaagagatggaggtgagacaagaacagcacccatatatacacctatccaactccatcacctggctagggattcattccatgatactggatattgtccttcctaagctattggaaacaaaggttctgttgggtcactacagtctgcagcgcaccgattttccctgtggggagcgctgtgccaaatgaagctggtcccagcaagccttgccggtcccagccagccttgcggcacgactcagcttttctctgtgacatgtcgcggagtcgccggtagggttcggtgtggcgagggggacctgcttctctctttgtgagaaccagggagtgagggaggaaggaggccaaggaggaggccaggactgagcaaggactaaagtaagactgaaaggggaggtgaggggtggactggttgtcggcagcagccggtaccggaagtggcggcagcagctgaggcgacgcaccgtgaggcagctgcttgactaggccacagccgccatggcgatgaattttggggaccatgccagcggcttccgccacaatgatgtgatcaggttcattaacaatgaagtcctcatggacggcagcggcccagccttttacgtggccttccgctcgcggccgtggaacgaggtagaggacagccttcaggccattgtggccgactctcaggtgccgcgcgccatcaagagggcctgtacctggagcgctttggctttgagcgtgcgagtggccacgaggcagcgggaggagctgctgcaccacgttcggcggctgcaaaggcatgcggaggagcgccaggcgacctcctgggctctaacgtcccagctgcagcagctgcgcctggagcatgaggtggcggcaacacagctgcacctcgcgcaggctgccctgcagcaggcgctgaatgagcgtgatgggctgtacgggaggctgctccagatcgagaggtttccccaggccgctccactggcccatgaaataatgtctgggccgcaagcagagcagaatggggctgcggcatgtcccctggctacagagcagcagagcgatatggtggccatggggacacatgctaatgcccagatgccaaccccgacagatgttctttatgtgccaggacctctgagtccctgggcccagggcatgcaaccccctctgccagtgccacatccattcccacacccaccaccattcccaatgaaattcccatccttgccacctctaccacctgctgtagtcacgggggcagaagcagcagcagtcccacttcagatgcctcctactgagatccacccaccttgcccgtggcctgcagtgggcttccaggaggagatggcccctctgtggtaccagagaagctacatccaggaggaagattccaaaatccttcaggggtcattccccttaggagacagcagaagccacagccagggagaaggttcagagaggtcccaaagaatgcccctccccggggacagtgggtgccacaacccgctgtcagagagtccccaggggacagccccactggggagcagcggatgccactcccaggaagaaggtacagaaggaccccaggggatggatcccctggggaacagagagagacaaaatcagaaagaaggtccaaagagggcccggaggatgcacaccctggtgtttcgcaggagccacaaatcagaaggtccagaggggccccaggggacggtcccccagggagacagcagaagctacagccaggaaggatgttcagatagggcccaggagatggccaccctggtgtttatcaggaggtgcaaaccagaaggtccaaagaggccccagtggactgtccccctgggggacagcagaagtcatatcaaggaagaaggcccagaggggccccagaggattgtcctccagggagacaacaggagctatagccaggaaggaagcccagagagggcccaggggatggccaccctggtgtttagcaggagctgcaaaccagaagaaggtccagagaggccccaggacactcccctgggggacagcagaagtcatatcaaggaagaaggcccagaggggccccagaggattgtcctccagggagacaacaggagctatagccaggaaggaagcccagagagggcccaggggatggccaccctggtgtttagcaggagctgcaaaccagaagaaggtccagagaggccccaggacactcccctgggggacagcagaagtcatatcaaggaagaaggcccagaggggccccagaggattgtcctccagggagacaacagaagctatagccaggaaggaagccgagagagggcccaggggatggccaccctggtgtttagcaggagctgcaaaccagaagaaggtccagagaggccccagggcactcccctgggggacagcaggagccatggtgtcagagaaagcccaaagaaatggcaacctcagaggcagaaggccaagaaaccaaaagtgaataaagtctcgggatcccagcagcaggagaagcctgcctcatttccagttccagtgaattggaaatgcccatggtgtaaagccattaatttttcatggcgtacggcctgctataaatgcaagaaagcctgtgtgccatttgagagtggaggacaaactcagtgatttcaggaaggtaagtaagaatggacacacttcaaagagaaagcaatttcctaagaccctcttctgattaaagtataacttatttacttcacagaaaaattgaaccccaaattatggagaaaattaaataaaataatttattatcccattacccaaattagccattttaaaagttgttttggatacacatacatacaaatatatatgcatttatattctcatgttattcatttacttgaacagagatggactacttttgatttctcctgattgcatttaaattttgcaggtggtggattctggatggccgatgctgattggttaataccctggagaagctgaagtcatgaagccttttcttttcctttttgtttcactccttttcctgaaaaagccatgtatgtggctgggagcagttgtgtgattttagagttagaagatatgttgaattttaggaacagtacttttccttgaaaatgctgttattcctttggaaacaaattttagaatcaccacacttccttgaaaatgctattattccttttgaaactactgcaatcttcatgttttcttcattttgctttgttggttttataggtgaggttctgtttttgtatctcagccccaccaaacttgcttgttgctgaagaagctgaacctgttccattagaagatcttccaaagccaaaagaaagtgagactgactgcagacttactggctgcagcagagaggagtaagaggaagtcagagaagaagagatgatttgacactcattgggggaaaaggaagagcagaattgttttgttagaattgaatttttccactgggacaaggaattaacttggaagagtttggggggttgtgttcaattctgtagatggtagcaactttgatgaatttcgtttagtttgttaaatagttattgtctaatatgtgttaggagctagacttataggttattatttggtgcacacatcataatccttgttgctgagttggttagaagataggagagagcataatttgggatacaaattagatcaggggtatcttctttgccttgcatgtagtgttgccttaggtaaaaccaatttaaataacatctagatccatttttgcagttttgtgggcaatgtgaaagagacttgcatgaaaggtcttgagtaaccaaactgctagtctcattggtttgcaggtgagacaaataagcagtggcaaagttcaggaaagtggtcttacagaagtgcaggcagggcttttctgattgtctgctgatttcctcctttgagagggacagatattttcctggctgccagtaagcctgcctgaaagaccactggggtgtcttgaagaaagacagtgctctgaggagtattcactacacactccagccctcagcctcgggctgcccccattccaagtccctttctagtcaataggtggatgaagaacaaaatggatttcaaggacagacagacagacataagggctgtgggctatggatggtgtttctcttgagaggactaattgggttaaaaataaaactggacaggggcgagcactcttgggaatgcccctggacccttcctctttggcgtgttctctgcaggctcccccaaggcagctgctgcaaggcaaggagggatccagggtagagctcagggatggtgggttagatctgcctccagtccaagctaaagatgtcttcaagtttccctgtaagatcccgcccagctcaccaaaatcaacctttgtcaggggttttctgatcctaactagtaataaagagtgtgcactggactgctgtgtcttctgtgtagtgtgtatctcagggcaaattttctcagaggtggaagcttaaatcttcatctttccttcatcccactgaagttcaatctcatttactaccggaggggccttcctcttatgaggaattacccaagaattgggggcacttctgtaggaccttcaatccatcatgattgtcctttctatcctcacagtccaagtccacatggtcccgtgaaggttagcatatcttctgctccagggtggtggggcaggaggggtgagttggggagggtgcttctacctaggcttggagctctgatgcctggaagccagccttctgtgtaccaagaagccatttccctgagatcctgtctccctgaggtcccctaatgtcccatgaacagaaactttcctcctgcatttctgccttccaagtcactgtcccctctcccctatgcataatcctatcaagttgtttaggattctggaaaacagccaggctgtagcctgtctgctcacaagacaaatgttccctgaggtgaaggggagtggaggctggctacctgcttggtatgggcacaggaatggggacagagaacaaaagtgaccttgccccgccagcattctcacttccctcagagtcatgattactgggaggtccttggttactttggaggggagcacttcagaggaagggatccattagggatgtcagacccaaagctaggttttctggattgggggctggttttatgatactcatgtgggctgatagctccttggaattttgggaagatgggatacagatgagacttggacatgtttcagcataatccattttcgtataccagcaggtcattctagatttcactatagttgtttcttttatggcttcaaaatggactctgttgttaattggcatgcttttaggcctttataaaaacagactcaccctgtgtatagcttttatatattttaatatgattacacagtctttcaggggcaacctttttcaaaacaatatgaatcattgaggctgtcagatcactactctcttccaggctgcatacatgcaagaaaaggcagcaggtttctgtggcataaacctgggctttggagacagagaaaacgagttcaactacttgatctattattcagtagctgtgtgaccccaaagaatttactgaatgtctctgagccccacaagtattagttccctttctctatcttcagggttctgctctggatcctgtggtcatgagtgtatgagattattaatcatagtaagagctaccattagagtgcttactatgtgttaggtactctaaggacattgtcccttttgatgactgtaaggtattataggtacccatattaatagttttcaaagtgggtactattgcccccaatttacaggtgtggtaatacccaaatttgggacttagtgaagcctggcttcaaaatgaaattttactagttccaatgtctgtactctccatcatatcacaccacctaaggttttacccttactgagggatacatgtgcattttaacagggatcataatacctaaacccaaagaaatgactgtgatggagggaatttgaggtatagtggcagtctggtggttgtggagctgctcttttagaatatctcaaattttgcctgggtgtggtagctcaagcctataatcccagcactttgggaggccaaggtgggcagatcacctgaggtcaggagttcgagaccagcctgaccaatatggtgaaaccccgtctctactaaaaatagaaaaattagccgggtgtagtggcatgtgcctttagtcccagctactcaggaggctgagagaggagaattgctggaacccgggagctggaggttgcagtgagctgagatcatgctaccgcactctggcctgggtaacagagcaagactcagtctcataaaaaaaaaaaattccaaattttgggatatgtgatcgataacccaggctgccactgagtagggccatttattgtcttagtcaccaagactgcaaaataagggcaatgatttaggcagtgggcatgacttgtgctgattcagcagactggacttacgaaaagtttatatctgagtttagtattaagataggacacatcttgactgcttacctaaagtctgtctgaattattcagtttttgttttaagtgaataaggtggcagctgtataagtccaatatacagtatatatatatatatatttttttttttttccagtgaggaaggaggggaaaattagattttgaaaacttcaggctcatgttgccaaacggggatgttttttacattatggtgctaaatctacaacagaatggcaaagaaacacataacttccttatcacatgctttgtaaagactcaacacggaatggtagcggctgcttcttatgtggtacaggtgctgcacaacactcttcagtggtttcttcacttctagcatgtgatagagtcagtgcatccactggcactaaaactcacatacacttaatgatactcaacagccctagcctgtgaccttatgaggttgctgttgaacagatttttctcattctctatactgtttattctttggtgtttaagaaaagggttcagaaatagtgaaatagacatagtaagtgttgctgcactgggtattaataatcccaggagacctagcacaattttttgagcacaactccctatttggttcactgttggaggcactctcttcaatggacttaagaattactctactaggtcagatcctggtccgtctaggctaacttctctggggcataaagcaattgtggaaaagcaccatatcatcctgagtgataattttaaaggtaagcaatgccactagaaatctctagcttattttattactttacacatcaagtaaacagcattcattcaaggcaggattgttataagctgggcaatatgcttcactctgtggaagtgatcgttattaccctcagtgaccttgtattctattagaagaaataaggtaaatatgcaccaaacagttcgcagtcttttcatcaattgttccatcatatttttttgcttgtagatgccagcttttaaaatattctgtatgcatgtcaaatgacatcaattaataaaagattgcttgttcatttaaaattaaggaaacctatataactataaagttctctcatacaaattcttaccaaatataattctaacctaaaagcagccacttgccatttttcatttaggattttggtgaggattcaatgaattccattattattattattactattattattattattattacatgcagcctaatcccagcaaatggaccattttactaggctctttgtaaaattgacaatacctcaaaatcaatattaccttcttaaaattctatgaaccttgggaacacaatttcaggaacaacctctgtagaaagctagtagttttaatacatgttaaatgccagtgagtgctaaaggattttagagaagtgcagtatataccattttgggttccaaagcttccatgatagccagatggttccgaattgtgtctgcagtctacaaaaaggttgctaggaaaattggctttgttttacttcaaaataatatgtggtattacagcttcacttgagacattttccagcactttgttgcttgtgtctatatctgctattttagattttactctttattctgcactacattataaaaataatttaacacaaggcagaaacctacgattacttttgtggtaggcagcattaaaccataccccagtgtttataaaatgatgacaatgagctatctgaggattttgtctgtaagtaaaagttacaggagatttaatctcatttattttttgcttgatatatatgtttattttgatagtttcagtgaaccatgttggttctaggaaggaaaaagattggacaagtattgaaaatttcatacctttaccactacaattcctgatatcgtctagacagttttgtaacttcagaacatttatgacttgctttgtaaaaggctcatagtatttaactcctcgctgatcaatgattctagcatttttttcatgaaatatttattactgagaaggaaaagcaaaataatgtcaatgttgcatatgtaactacaaaatgcatttagaaattcaccactagctgttttgtttgctgggttataatatttcatttgcatttataaaactgcttagggaaatgtttatagttcgcttcattccattccttcgcgaaattttggtatttgtgatgtatacatcaaagtggtcatctgtgtttgaaaacatcagagatttctttaaaaatgttcaggcaaaaatatatagacaaaataagagtctcttggactttaatcttttcgattaaagctccagtggtggaattttattcttgagctttcaagaaagagaacagattttttagatgaaaagccgcagactcatttacaaagacgtaatattttcttgtgctgatagcataccctgagggcccccacccaggataaagagaggcggaaagaagattctgtcgcgatccaaaggcaactggttgatgaggccaaataagtacatgatgatttatttgtgtgtcaggtgccaaggtgtgggatgtgaagagttatatctataaaccaaaatgaggcagaccacagggtagacgttggtaagtgatgaatgtgaaagaagtcaatgtcagaaatgatatacttcttgaggcaaattagaagccacattctctgcagagggttctctctataaagggaaaaaagagggggaaaggaagggagctaactaggtgccaggtactcttttaggttctgggtgtgctaagaggaatatgacatcatctctgtcttccgggagttcacaggctagtaggagaaaataatattgtgtatttgttaggctccaggcacaccgcatataccatcacatctatcttcatggaaaaagataaaaactaatgaggagtggccttcatttggtctagaaaacattcaaaaaggagaatggggtgataagaccttatctgtgtatccaggtcttcccaggagagaaaatatccgtatcactttaaaaacaaaacaaaacaaaccaaccaaacccaaactactcagtgttctgttactttggatggatgagcttatgatcctgtttccagacccataaacccaggaaacaaaacttgactgtgaactgaagacccttccaagacatagtaaataaagagaatgaggctaaaatagtatatctgatttgataagacatatagttatatatagacatgctatgagtcagggcatgggaccagttgacacttgaaatgtaagaagaatattctagaagtccagattacagtcgctagataggagactgaagcctgagcaatccagtgcagtgacctcagaattaatgttgggaggcagaagaggatagtggtgaagtgcacaggctctgcagtcagtggcctgtgttcatatcctgggcctgacattgaccagttgtgccaccttgaataggctacctaggttctctgggtttcagtttctttgtcggtaaaatgagactaataatagtatttgcttcacagggttgttgatataaataaatgagataatacattcaaagtgcttagcaggatgcctggaatatagtatgcagttaacaaatattagctgttgctattattccgagaatgaaacctcagaagcatgcagagtttcagctagaatgagggaacttcctttgagtcacgaaggaggcaaaattcgtgcaataaaaaaaaaaaaacctgtacacagcagacagaaagataaaaacactttccatctcgaatagattgtgcgagttagaatataagttgagttagatatgccactactatgtccctagagccccatcctttcctctatctcagctcttgttaagtgaattataattgtctgtttgcttgtctgtcttcttcactggacctatgagctacttaggggcagatactgtacttttctgtaacctaagtacctactataatgtctggcatatggtagatgctcataagtgttggttgaaataataaaaatatttaagacaggcttaaataaacacacacaacaaccctgtctctggcttctcacttaaaaagggcatttagaaagattggcctcataggtaaacccagagattatcaaaaggaggtgctcttttgtaaaaaaaacaatttttttctttaatcatttttgtaaaggaagtgaattttagtaagtgctgagagaatgtgtaaactcaccacaggtaacactgtcataacactgtcacaggagaattcacacctataaatgagctagtggaagaacaaagttagttttgaaaggtcagagaaaaagattttgaaatgtcagagccactctataaaactgaccacccttggcatcattcttttaatctacctgggtttgagaatagcctagggcatttgaaatgaagacaattagcacctcagacagggcttccacatgcaaaattctgtcacctctcagagacctcaggagttgacaagtttggttaagaagatactttcaaccttggctggcagtttttctaaaatttcaatgcttttataatctgatttaaatggcatctatattctaaaaggttgtaactgtgaagctctcttcctccattctatgattttcccccttaagttattgtaaaatgtcaagaatgaaaatatttcctttattgagggagattgaggaaacaggtctttgttcttgtgcacaaataagttcaattcatttcccctctgtttctctctaaaacacatttggcttttgtttagagaatagaatgttaaacctagacgtgaccttaggggtcatctggttcaattccatttgacagatggagaaaatgagactcagagagaagtgatttagtggcaaaacatggcatatatttcaactctcctacttactggactactgctccttccaattcatcttgtcatttcaaagacgaccataggcatgtagaaccaatattgtgtgtgtgtgtgtgtgtgtgtgcgtgagtgtaaaagagaatttcagtattttttcttttattgagagcattaagttcattcattcattcattcacacaacaaatatatatagcacctactacttgccagacacaggatacagtggtgagcaaagtacacaaaatccctccatcatggaccttacattctagtgggggacacagacgataaaccattaattaaataattctgctcctaagtggtttatacttgtacttggggtccattcttcctaactctttctctgttggtgcctctactatctccattgctctcctctttcattttctcccatttcctctcgtgtgtatggggagagaaggaagagagtcatttcaattcctcttttctctacgcttcaagctcagtgtgaagttttgaatttgctaaagtcaggtttagtactggtgtaggattagagtgaagatgtcagtatttttcatcaacactgcactagtgggctggctcggctggctcagctgtcagcttgcttgtaagatgacaatgaggtactggatgtgaaagttgtactattaccttataatttatctgttttttagtgcaattttagttgtgctgaaccccgtcatacctggctgctttgacaggtgtgctattttagcaacatggaacaaaacagagaaagaaaaaaagagtgcatggtacgcttgtgctgtcagatccaggttgctctgttcctaagtttatggatgatttgttcagagttgttaagagacaaaaaaaggttaggttttgttttcacttatgtgacactgaatgttctcacagttcacctcacaggtcagctgttgctcatatggactgatataaagggatccctttccctgtctcctttctatttgaaattccaccattttgattaattcctctgggctaaccatttgcctgctcaatatatggagagcccaaggtggacaacctttcaaatccttaatgttggagtatgcattcatatatcagattaatttcttccttgatccaaagcatgaaaaggggtaagaggtggagttggtcaaaaacatgtgaggaaggaagatgataaaataatattggtcccattccccagagccatccccaaatgtcaccttgaatgctttaaaaaaaaattcttaatgctgaaaatgactagtaggagacttatgtttatactttgcatactaaggctggacactcttcaatcaagaagaaaagttgctaccagctaccactgaaatcttagaggattgttcttaatcctagtagatgaagagcaaatatctgcctttggtgcaagtcagctctgtacatccaatccattggtaagacatgtgaggaattaagtgtcgttctcgctattgagttcccagccttgccatattctcaaagaactacacactgaagttgcagaaagcatataatagacgacatagcttcagttatttaaattcaaattttaaaagtactttacataatctaaaggtacatgtacaagaccattcagcttcagcaataaataaagtcttactctagtgaaaatgcaggaagctttgcggaaatattacctagcacattttgaaatagaagcaatgttttatttcagagaagaaaatgaaggttgaaaggttttaaaatattaaagacagtttagcctcaatcgaagaaataacattttctagaaacaacagagaataaaagttacaacaaaattatcaacaacttgcaaatgattcaaaacagattttatggacaaaatgctgaaaggtgggccctgtacaccaaagggcacatacaaatccacataaaggcaaagcaccagttaaatgattcacagtctcatctaaagcccatcaaatagatacatctggaacatctttggatgtacattgtgacttttgtatctcaactagcactttgggaccttggacaaggtgttaggaaagaaatcaatatttgctcaggatcaagacttctcaagatgactgcgtgaggtagaaggaagagggagaagaagaacttgcccagagttcactgttcatctactatgtctgattctgtaggagtcttcatggccatgttcagtaatgattgcatactgacagtactgataaaactatcagtgttttgttctcagagctcttggtcctttcattttgtcagtgtgtttttgccctacgtagtgggtccacataccaacagagacatgtacaacttgcctctatcatcaactccttatgggctagttgagctaagttattcctggtggcctctgagtaaaccgcaagaacagaagcattactaagcatccccgtctgagtgcaagggtgtgtgttggcagtacagccccaatcttgcaaaatccttcttccaatgttcctcccctctctgtatgaaccctgtgttggggggcagaagatggaagcccttggcaagctcgatcgaaccaagctactaaattgctgagctcgttttaactgaagtgtgagaaggaggtttaaggcaagtagacaacatcctgttgttggggtgcttctctcttttttgcacatctggctgaactgggagtcaggtggttgacttgtgcctggctgcagtagcagcggcatctcccttgcacagttctcctcctcggcctgcccaagagtccaccaggccatggacgcagtggctgtgtatcatggcaaaatcagcagggaaaccggcgagaagctcctgcttgccactgggctggatggcagctatttgctgagggacagcgagagcgtgccaggcgtgtactgcctatgtgtgctgtgagtatgatacggtggacatgggcctgctgagggtgtgggcggtgggcaacagcagctggggccagggtggaggccgaggcaggcaggggcgccggcgttagcagctcgccgacgcctcctccgtggcccaccctcaagtccagcccagggccgtggtggaacacactttcgcctcaatccctcgctggggatttcattccctgggcctcctgctctccagaaggccctcaccagagccttttggggcagctgcagagaatgccatttcgggtggtgaaatgtggtccacagtttaccttcgctccgggaaagacccaggctccccacttccattttgacccctatcgggtggcgccctgcgagccttactctagctctctttaaacgacttttgaagtgtcatcccaaaggaagagcatgacattcagagagaggaggcacattaagaaacagagtcaattactttaagaatgcaatgccagttaggtcgagatgctgagagaggagggggatgtgtgtcagtaaaatcacctctctggatctgctgatgtagcatcctttagaaaagtagtggggggtggggaggggcaggggatttcagaaataggacccttcttgataaacgttaggactcacaatagtcttaaagggaatggagggaaaacacccttgttatgattcagctttgccatttgcctaggcatgtctcattctaaggcttcattttgaatcaaattcatctgcgtctttgctccagggctccggagtcaggcagatctgagactttgtcctgtgctcgtcagatgttaggtttgtgacttgggcaaattaacctctcagttccccagttttcttatccattgaataggtatcatattactgcctacctcataggattgtaagattaagtgccataatgcagtaaaaaaattagcactggggcctgacacctagtaaatgttcaataaatgtaagctattggtattattattataccaaagatatattattattttatcttctcttttcagttgatttcttttaggaatcatgggggcatttctaaggaaggacctagctcaggcattattgtcagcaggataaaaaaaaaaatccatgaaaacagcagccctgcattgtaggttctagacagaaaccaaatgaggttaaatgcttggtagtaagttcagcatctgataataccccacaagagtttgaaataccttatgggtcagtgaagaaagattatcctgatgctggtgctagaagatttttcactgtatattgttttttaaaaacggtcaagccttgtttgtggcagctctcaggtcatgctaaatacatttttcacaaaggcttcaagggaaatacgtggaagctattgaatgtcttgggcttgaatctttatgttttgcttatataattattgttcccgtgtggaacctagggaagggcaatgaaaaccagctaggattcttaggctcttttctcattgaaagaaggtggagtgagtgggtgggtgaaaggcgctgctttagggaagctgacaaaggagataacatgctccttaacccaaaggtgaaaaagaatgtacaaaacaagtctgggcaggggagggacaacagggtatagtgagaggcaagatatacctaaggcttcagcctcacggggctcctggccgtttctcaagctcctcaaaaatgcccccacttaggatttctgcgcttattgttccttctgcccaaaataccttcagttcacatgtttgttcaactgtctcctccctcagagaggacttgcttgaccacctatctagaacaagtgccctctccctgtccctgatacactcactccatctctttatttttcttcaaagagctttaaactatctgataatttgcttgtttacctacttattgctgggctgtcctgcaaaaatataatctccatgagggcggagatactgtctccatcaccagaaacacaggaacacataataggcactcagcagatatttttgaattaacaaactgtcaaggcaaattctgttctttactgcaataaacggaatggccattgagaggttagggtatggactctgggaaagtcactcaaattctctgggactcagtttccatatttataaaacaggaatagtaatgtgtatcctaccttctgcaaaagattgccttaagtaccttatgcaagagagaagggcagctttagacttttgcctatgtaggccggaaccacatgaggaattaacttaggcaggtgagaaattatcaagcatttaagttttcgcccaaagtgaatcttgcataaatgcagtttttatgactcttagttctccatgaaaacctccttgtgaagtagcggaaaatactagacaaattgggagttcccttacggtgtctttcaaatggtacactggggcctcaaagtcttatgtgactgttagggtgatagccagaatgtgctgcagagggaagatatgaggatacattgccttttatcagtttctcaatgtttttgagttgagtgtcccttttgataaatgtaaaaatttcattccctctttttggtgctacactgtaattataaaatcagattttatttagaaataaaccacgtactcattttaaaccagaacacttatgatatgcagtcgaaataacaatataagtggtatcatatacacatggacaacaaggtatagctgacaaacatgcattgattgtagggtttactcagaatggtttctcattctatcttttgtttactcctattaaccaagaagatttaattgagctatagtttttatatttttattgtagagataatacatttcatatgccttcaaactgtactttaaactgtactttcaaacgatgcttgcccttttccccagttctgaacctcctaatcatggctttcagatatggccttttcttctgttctgatttagaaaatcgaaaattgaactgcttcataaagcactaaaggagttttccatttataggattgctcaccttcattttaagtaataagtatttctttcaattactttctctaaataaatatagatttttgtataagtctattaaaaatagttccttatacctattcattatagaaaatttgaaacatatagataatagaaattagagaaaaatcatctatagttttataacctaaagatgactattgctaaaaattaggtgaattttcttctatattttaataagatgaattgctttttgagcacgtgtgctcttacaattgtattcttacgagtgacgtatttgactactaaaaagtttgatttttgtatgcgtcaaaaaaagtaagggcaaacaccaaatgttatatatttatatatatataaatatctaatatatataatatataaatatataatataaaatatataatatataaatatatattatataatattatataatatataatatataaatatatattatatataatattatataatatataatatataaatatatattatatataatattatataatatataatatataaatatatattatatataatattatataatatataatatataaatatatattatatactatatataatatataaatatatattatatactatatataatatataaatatatattatatactatatataatatataaatatatattatatactatatataatatataaatatatattatatactatatataatatataatatatactatattatatatagtatattatatactatattatatagtataatatagaatatattatatattgtatataagataatatattatatattgtatataagatataatatattatatattgtatataagatataatatattatatattgtatataagataatatattatatattgtatataagatataatatattatatattgtatataagatataatatattatatattgtatataagatataatatattatatattgtatataagatataatatattatatattgtatataagatataatatattatatattgtatataagatataatatattatatattgtatataagatataatatattatatattgtatataagatatattatatattgtatataagatataatatattatatattgtatataagatataatatattatatatatattataaatatgtatatttttatatattattataaatatatatattttatatatattattataaatatatatttttatatatattattataaatatatatttatatatatttatatataaatttacatgtgttaaaaatatgattgtgttcttgtattcttacaattgtatacgtttcccatttcccacttaatatgaaaaaaatacactcatatgtaatgttcttagagacaactttaagatgttatttttaatggctgcatggtagtccagctagctagtaagtataccatattttgcttagccagtcacctacttttagacatttgactcattccatatttttgttattataaattccatcaggatgtatatttcagtacattaaagtttccttgcatttatgattatttccttagaatgaatttccagtgtggaatttctaggtcagaaaacataaacagcttaggattcttgatatatacatgatcatgagatattttccctaaatggttattccaatttacatgctcacctgtaatgcatcagtgtccatttcaccacaccctcactagaagtgggtattgtagttaagaaaattttcccttgacatttggcctgttattctttattttatatttacactctatctctttattttccacattttatattcctttggttagtgactgtcattttatatggttgttaagctgttgtatttcctcccatgatttggctttttgtgtatttttctcatttaaccagttgaatcatactttttttaaacacactctatgtgtatatatatatatgtgcactaatccttgatctattgcaaggtatcctttcgaagtttggtgtttgcccttacttttttgacacatacaaaaatcaaacttttttaacacattgtaaatttatatatatactaatccttgatctgttgcaaggtatgttttctaagtttggtgtttgcccttactttttttgacacatacaaaaatcaaactttttagtagtcaaatacgtcactcgttttctttgtgtttgatttcttccttggctagaaagtcctttccccttgagatatgtcataaaacttcactgcagtttttgttttaaattacggttttgttagtttacatttacctctttaattccatttggagttgtattttgatgtggataaaagatctaatttgattttgtttccagatagctagcaattgtcctaatataatttataaatacaacttccattcttcattgatttgctagccgactttaccatatattaaattcttatatataacagttactgtttctggactatctatttgtctcaattgatccatttattcttgcactgatagcactatagtatgataatgttttaatatattttaaaaattatttgctattcttatctgttggttcttcaaaatgaaatctagaatcattttattaagttaaaaaaaattcattggaccaaatgttttagctctcacatgccagtgagaacacatgatatttgtctttctgtgcctggcttatttcacttcacataatgacttccagttctatttacatttctgcaaataacaggatttcattctttttaatggccagatagtattcaattgtatatgcatagcacattttctttatccattcatctgttgctggactcttctatatcttggctactgtaaatagtactgtgataaatgtatgggcgcaagtatccctttgatatattgatttcctttccttttgatagataccctgtagtgggattcctcaatcatatggagatagagagtaaaatgatagttaccagaggttgggaagggtggaaggcgatgaagagaggttggctaatgggtacaaacagacagttagatagaagaaataggttctagtgttcagtcgcacagtacggtgactatagttaacaatatcttatgtattttgaaatagctagaagagagtacttgaaatgttcttacatatagaaatgataaatgtttgaggtgataaatatcctaaatattcaaatcccctgatttgattattacaatgcatacatgtgttgaaacatcacactgtaccccatgaatatgtacaattattatgtatcaaaaatttttttgaaaacaccattggggttacattaaatttattaataaactaagaatgaattgtcatctttaaataatttagtcttcccttcccataacataagtctctccatttataatttttttgtttatatccatcaatcaagttttatagttttctttttgtatgtcttatacattttttgttatttcgagttattgtgtgtatgaatgtgtatgctgatttttaaaaatcataaatgggatctgtttccactatattttctgtttcataggaaagctactgattttatgttctgttcttgtatttatccagtgtactgaatgctcttattaatgcagatagttttttttttaagtttattccctttgttttttttagatacatcaagtttcttttcactgaggtacatatgttctctcacatttcttcccttctcaccctcaatgtagacagccattgggaaagttctgactgcccagtgggattgatggtgataagacgagaactaatttaaaatatttaaaataattagctcaaaaaatagtttatttccatagttggcatccttctggacatatctgcctttgtttgctacttatctgatggaagatttggaagaagaaatgctgttataattctttagcttcaaggacacataatgaagtcatttgacatgtatgtctttagataaatgcataattatctttttgtcctttaagttttaaagggacaactgggaataaagtgcctgtcaaacaactgaactggagaaatgggggaggagcagtgatgaaataaaattccagtttatcagttgcaataaaggggaacagtgtggcaaagaacttgaaattataacttaacttcatttagtgagaaattacaacttgcatttagtttttgaattcaattggatatgtgccttggtgccacatttatcttcatgataacttaggccaccaacattattttcaatttcctgaatacaatccagtggtaaagtgagcctgaaagccagcctaggattgtttgccacatataaaccaccgaatggataattcacggcaaataagccaagtactgactctggttgacaatgtaaaattaaagttgcaagattagcctgaagatgtcatttagcttaagcaaagggggagtctgggttgatctctttcgggctctccccacctggcctcttcccttcagctccctccactgccctccttctctcagtggacagttctagctccatgtccaagcagattccctccctttttgagaattgtgcttttggaattgtcttaaagaccaatttgttaatacattccctctagtataagagaggggcagcacagaatggtggttaagagcccagatcttccagccagatctctgggtgtgcatcccagctctgacccttaactagctattttcccttgggcaggttactttaactttctgtgtctcaggtttcttacctgtaaaacggcagatggtgataatgagagtacttacctcacagggttgttatgatgattatgacatgagttaatatttgtaaagttaacatgtaatatgtgttttttaatatgaataaaagctctataaataattgtaatacaaagttagaacatcataagtatacgtaaataaaacttgatatggaagttcaggggaagaagtggttatatttattttcatgactcatcaaaatatcacatagttttaccatcacacttgaagttgaatgactttcaactgtttcaaaaattaaaattctctctgaaagaataaagtttgggccattgtaagtttggaaagctcttgaatcagagtatagtctcaaaaataatggctttgtgtaggatactattcctctggatataaaagttctgaaacgtttgttaaaaatcattatagttgtgtcttgaattttgtatgtagcattagttcgtatagacgtagagggcataggtactggcttgctttatttgaaatgtcatgaagaagtcagatgtagctaaatgttttcttttgtgtagtacttgacgtggtataaaaaaggaattgatgtggatttgtcagttctaaaccaggatctgtccccaacactgacccactgagaaaataagaaataagtcaggttggttgcttcttgcttcttgtccatttctaacctggacacttttttacagttagggacaacttttgatgaaataaagacaaatttcaatatcagcagagactagattaacacatgctttatagtaattaaaataaattaaaggcaatgataaaactccaccgttctttaacaattattcatgttctgatttttttggtgatacattttaaactctaggattatcaaaaagtccaaaaaagctttaatgagggaaggaagttaaaagtacactacattgctggtttgtctgtattaagggagggagtcagaggaaatataatcctgaaggggatgtaacaatttaaaaaaatgaattacatttttatgagttgtgatttgcttaggctaggtttgtaaggctccaaattgtaattctgcttgtttttcttaaaaaattagtcacttaaataactacatgaaaaaataacatgcaagaatgcatttacgttagtttaaatttacttctagtttatatacacacagggacagacagttttgaatagttgtaatcagagtggcatccccttgtgcccactttttacacatactgtcattttatttttttatttttattttttgttttgtgtgtgttttttttaatactttaagttctagggtacatgtgcacaacgtgcaggtttgttacatatgtatacatgtgccatgttggtgtgctgcacccattaactcatcatttacattaggtatatctcctaatgctatccctccccccaccccaggacaggccccagtgtgtgatgttccccttcctgtgtccaagtgttctaattgttcaattcccacctatgagtgagaacatgcagtgtttggttttctgtccttgcgatagtttgctgagaatgatcgtttccagcttcatccatgtccctacaaaggacatgaactcatccttttttatggctgcatagtattccatggtgtatatgtgccacattttcttaatccagtctatcattgatggacatttgggttggttccaagtctttgctattacacatgctatcattttatgtcaacatagtccacatacttaaagttttctggaaaacctaagactctaacatttttgaattttggcataagattttatttgtttatttatttatttatattttttgagacggagtctctctctgtcgcccagcctggagtgcagtggtgtgatctcagctcactgcaacccctgccttccaggctcaagcgattctcctgcctcagcctcctgtgtggctgggattacaggtgcgtgccaccacacccagcagttttttgtttgtttgttttgtatttttagtagagacagggtttcaccatgttggccaggctggtctcgaactcctgaccttgtgatccacccacttcagcctcccagagtgctgggattacaggcgtgagccatcgtgcccagccagcattaacattgtaaaccttcacctttgacatagaaagtgtaattttgaaccattgtttctgctataattcctttatttttccctaatttatatatttatttctaaactggcaaaattgtatatatgtattgtgtatgacatgatgctttgaaatatgtatacatgtgtaatagctaaattgggataattagcatatgcattacctcacatacttacattttgtgatgagaacacttaaaatctactctcttagcaactttcaagaatacaatacattgtttttaactatagttgccacgttgtacaatagatctcttgaactttttcctcctaacctaaatcttttatcctttgacccaaatttcccaatccccaccctgcacgcccctacgagcccctggtagccacccaccattctactcttggcttgtattagttcaactttttaagatcccatgtataactgaaactacgcggtatttgtttctctgcgcatagcttatttcactttacaaactgtcctccatattcatccatgttgttgcaaatgacaagatttcctttgtgtttaaggctgaatagtattccattgtgtatatacaacatattttctttatccattcatctgttgatagacatgtaggttgattgcattatgtcttggctattgtgaataatgctgcaatatacatgaaagtgcagatttctccttgacatgatgatttcatttccttttgatatatacccagcagtgggattgctggatcatatggtggttctatctttaattttttgaagaactttcataccgttttttataatggctgtactaatttatattcccaccaacagtgtgcaagggttcccttctctctgcatcctctcttgttgtcttgtttttgataataaccatcctaacaggtgtgaaatgatatctcattgtggtttcatttgcatttttctgatgattagtgaggttgagcattttttcacatacctgttggtcatttgtatattttcttttgagaaatgtctattctggtcctttgcccatttttattttattttattttttttgcaatggtgtctcggtctgtcgcccaggctggagtgcagtggcgcgatcttggctcgctgcaaactccacctcccaggttcatgccattctcctgcctcagactcccgagtagctgcctttgcccatttttaaatgggattatttgttttctttctattgagtaatttgagtctcttatatattttggatattaactccttatcatatgtatggtttgcaaatatattctcccattctgtaggttgtctcttcactctgttgtttcctttgctgttcagaagctttttagtttgttgtaatcccatttatctatttctgcttttgatgtctgtgcttttggggttatacccaaaaacaattcccttattttgagcaattattccttatttaggggtgcttaggttagttccatttttttcactattaaaatagggctagtatgaaaatctttgtcaaattgcgttttcctcttgacttgtttccttggagtgtatgaagataagcaaggttatgcagtcaaaaatatgtatggttttataggtctcgttatataacttgccagtttgaatagcgattttccatggacagggacagagtatgttttgtttgaaaaggcatattcaatattttagtttaattttatgttacaaaattactggtttataatagaagctatagaaaataaaactaagaaatattattggggaagaaaggaaaaaatggttcagaaacactgtcctgtgaagactgaaatgattgacaaaccttcagcttatactaaaataaaattgcattcttaaagcatagactgaatgactacggaggaggtggcacagaactgccctgggcaggtggaagaagccaggttgacaacagggaagttgccatcaatattcccaatgagatgtgggcattcgctttacattttaatcagtccttctgtaactttaatgttcatacaaatcacctgggcatcttactaaaatccagattctgatttaacaggtctgggtggggcctggaagtctacatttctaacaagctcccaggtgatgttgatgctgttgtcctgggaatgcaatttgagttgcactgttttagatctcttccttgtatgacatattatagtaagagttgactacaggggatccttggtcagttacttcagtaacttgaaagtgaaagatataaactgctggcctatttgaggggtgaaacaattttgctcattcagaaattggaggggttgtggggagaaggaaattgttaatattagatgagttaatcatgagaagttttatgtaccattcacaccaggttgttcagagactgaaggaggtacgaagttttgaagtggtactcaggttcctgctacttaactgaaagtgagataagatcagattcgttaggaaacaattctcaaaacagactcatttactttgactaaatgcgtctgaatgatagtagggagatagagtcattgtattttttagagacccactgttttagaaagtggaaaacttgttgcttaccattctgcttatcttgttgctgagattttaaataatgaatctccacatcacccttatgatactgaattattgccattaatcatttctcatagggaaaatggaactaagaacctatgctgtttcactgcttccatctccattttgctatgtggctttaagaaaatcacttaaaggcttatgttgagttcccatggtgaaaaatggaaatcaaagctcttgccttgttccccatagagtacttgctgaagttagtgggctttgaggtagatttcaagtgtttaaaaagacaaaagactttaacattgtaatattgtatatttattcagcatattatatataggcatatatcaagctattttatatatgatctaaatattctggcaatccttcgtaaaaaataaaacatcatataatccacatcagtagttaaattgaccttttgttcagtgtcacgaatcaagtaaatctgaatagtgtgtttcagatttgttttggccctttaggtaatcagttctgatgcatattgatgaaagatatagtaatttttttttttagatggagtctcactcttgtcgcccaggctggagtgcaatggtgcgatctcagcgcaccgtaacctctacctcctaggttcaagtgattctcctgctccagcctcccgagtagctgggattacaggtgcccaccaccacgctaggctaatttttgtatttttagtagaaatggggtttcaccatgttggccaggctagtctcgaactcctgacctcaggtgatctgcccacctcagccacccaaagtgctgggattacaggcgtgagcctaatttaattcacatatttaaatacttttatttccaaaggaggttaatggtaaatgtgatcatcaagtcaagcatgacactctgcttgtaaacacattgattttaaccagagttcagtgcatgtcctggctaggtgtggtggctcacacctgtaatcctactactttgggaggcctaggtgggaggatagcttgaggccaggagttcaagaccgtcgtggtcaacagagcaagaccctgtctctgcaaaaactaaaaaaaaaaaaaaaaaaaaaaaaaaattagctaggcacagcagtgtgcaactgtagtggcagctactcaggaggctaaggcaggagggcaaggctgcagtaagctatgatcaccctactgtactccagcctgggtgacagagcaagacaccattaaaaaaaaaaaaaaaaaaaaaaaagcatgtgtcctaaccaaaagatctctattgacccaaacttgtgcccaagaatagcaatcagaaaatttatgaaatgaatgatttagattcacattcaattgattcacaattgattttgattcacattcaaaaactgaaacaattcattataaagtttaccttactgttttatgaggtaaaattttattaggcaaattaagtaggattactatatatactaaaatataacaaataatctatatccagtacagtgtggggatcaggaactggggatctagaatcaaatgggcctgattcaaatcccatttttgcttcttaatctctagactgattttggttacttaacatctcaaagtctcagtttccccatctataaaataaatattacaacataaacctaataggatttttgtggggtccaaaggagataatgcatgtgctagaaacttaactttttatcctcctaaattcacacgtttaaacccttacctccaatatgcttgtatttggagataggacctctaggaggtaattaatgataaatgagatcataaggatggggctgtaatctgataaatttggtgaccttatgagaagaggaagaatgcatgtacaaagaagaggtcatatgagcacacagcaagaaggcggctgtctacaagccaagagaagaggcttcagaatgaaacataccttaccagcaccttgatcttggacttcccagtctccagaattgtgagaaataaatttctgttgtttaagccaccctgtctatggtatcttgttatggcagcctgaacagaccaatacagattttggtactgagaggaggagtattgctgtaacaaatacctaaaaatgtggaagtggccttagaactaggtaatgagtagaggctggaggagttttaaggtgtatgctagaaaaaagcatagacggctgtgaacagaatgttggtagaactatggatgttgcaggttattctgatgaggtctcagatggaaatcagcaacatgttactgcaaaatgggagaaaggtgttccttgttataaatggtaaagaacttgactgaactgtgttctagtattttgtggaaggtggaatttgttgagtaaaaaaattgactttttatctgaggagatttctgagcaaaaagttgaaggagtggctcagtccctcctgactgcttatggtaaaatacaaaaggagagagatgaattgaagaaggaattgttaagcaaaagggaactggaacttaaacatttggaaaattctgagcctttatgtattgcaataaatgaggaagcttgttctggagacaacactaagggtgtggctggactatctgtcactacttaagattacttatgatgttaaccagccatctgagcagaagtcaggaatagagtttggaaaaaagcagcagaaatattaccagtttggaccaaagagaacaggacagtatggtatagttatttggctgcaaacatggtttatctttcaagaaaagggaagaacgaccctgagggtgattcagagataaccagggctgccattcctactataggcccaaagtgcacaggcctggagggtaaggctgcctctaccttggtttcaaaaagtgagactgacatccaacagagccacataggtggggccatcaccctagccaaaggatgtggccaccttacagagctgtgggggtgatgctgcttttccagtgaacctgaagggcagaatattgaatcgaagaggattattcttgagccttaagagctaatggagtttgccttgctaggttttggacttgcttgggacctgtgacccctttatttcttccaatttctcccttttggaatgggaatgtctatcctcttcctgtagcaccattatattttggaagcacatagcttgtctggtttcatagtttcacagctgaaaataaattttgcctcaagatgaataatactgctagtctcacccacatctaattttatttagatgagactttggactttagattttaagttgatgctagaatgagttaatttcttttgaggccgttgggatggtataagtgtgagaaggacatgagttttgggggtcgagagtggaatgatatagactgaattgtgttcccccataatatgtttaagctctaacttccaacatgactgtaattggagatagggggtaattaaggttaaatgagttaaatcataagggtggggctctaatctgataggataatcataagtgtggggctccaatctgataggattgggggccttattacaacagaaaaggctgtctgagtacacagcaagaggtcagctactcacaaggcaagagaagagggctcaaaatgaaacttatgttgctggcacctcgatcttggactttccagcctccagaactgtgagaaagtaaatttcttttatttatgccattcaaggtatggtattttgttatggcagccaagcagactaatacagcaagtaaaactcttggcatgtagtagaaatcaattagacaaatatacaatatagatataaactgagtaatgggaaggaatgtttaccccatttaaaaggataagctgcttttaggaaaataaagttacaactaaggcactttggagatagtcctagtttacagaattttagagttgctcttccacaaaagtataatttaaaacaagcagcacttgtttttaattcatatattttttactattacttcatttataatatattatagggtaatatagtaatacagtcatgtgcaatatagcaacattttccttaacgacgaacagcatatacaatggtggtcccataagattataatggagctgaaaaattcctaccacctactgatgttgtagccattgtaatgccacagcacaatgaattacttatgtatttgtgatgacactggtataaacaaaccgactgtgctgtcagctgtataatagtatagcacaggccaggtgtgatggctcgcacctataatcccagcactgtgggaggctgaggtgggtggatcacctgaggtcaggagttcaagaccagcctgaccaatatggtgaaattctgtctctactaaaaatacaaaaattagccagccatggtggcatgcacctgtagcctcagctactcgggaggctgaaacagaattgcttgaacccgggaggcggaggttgcagtgagctgagattgcaccactgcactccagcctgggcaacagagcgagactctatctcaaaaaaaaaaaaaaaaaaaaaaaaaagaaagaaaaagaaaaagaaaaaaatgtatagcacagacaattacatacagtacacaatacttgataatgataacaaattactgtgttactggtttatgtatttactgtactatacattttatcattattttaaaatctactcctacttatataaaaaaaagttagctgtaaaacagcctcgggcaggtccctcaggaggtattccagaaggcattctggaatatgaatatcataggagatgacagctccgtgtgtgtgactgcacctgaagatcctgcagtgggataagatgtggaggtggaagacagtgatactgatgatcctgaccctctctgtaggcctaggctaatgtgcgtatttgtgttttagtttttaacaaaaaagtttaaatagcaaagaatacataaaataaaaattttgaaacagagaaaagcttatggaataaggatataaagaaaaacagttttgtacagctgtacaatgtgtttgtgttttaagcgaagtgttataaaagagtcaaaaagtttaaaaaaatttacaagtttataaagtaaaagagttgaagctaagattaatttattattgaagcgatacagttttttttttttgagacaatctcgctccgtcacccaggctggagtgcagtggcgtgatctcgtctcactgcaacctccgcctcctgagttcaagcgattctcctgcctcagtgcctcagcctcccaagtagctgggactacaggtgcgtgccaccatgcctggctaagtttttgtatttttagtagagatggggtttcgttgtgttaaccaggatggtctcgatctcctgacctcgtgatctgggaaatataaatattttaaaataaatttagtgtagcctaagtttacagtgttcataacattctagtagtgtaatgtcctaggccttcacattcactcaccactcactcattgactcacccagagcaatttccagtcctgcaagctccattcatggtaagtactctcaacaggtatagcattctttatcttttatactatattttactgtgccttttctatgtttagataggtttagatacacaaataccattatgttacaattgcatacagtattctgtacagtaacatgctgtacaggtttgtagcctggagtaataggctataccacatagcctaggtggtataccatataggtttgtgtaagtacagtctatgatgtttgcacaacaacgaaatcacctaatgatgcacttctcataatgtatcccccttggtaagtgatgcatgactgtggcaatattatattgctatacattataatagtaattttataaaaatatagttatattcaatttatagtattatatccttatactattgccattatatttataacaaatattattaatattaataattatttatgtgggcctgatagtgtattatcccagtgaaatgttttcaccttaagtttcgatatgtacttaaaaataagtctattgtttgttaaaactatctaataattcatggttttatcaattacaacaggtccctgttgtagtttctttctgtccaaatggtctctcaacttgacaaatctttaggagcatgaatttccatatttcaaaaaatgaaaagataaagaaatctcactggaaactgtggttgggcagatacaatatggagacaagttagattcactatgctttacttcctatgaatgcaatgacaccatatacgtgtgtcctagtatatgtgacatttatatgtaatattaagctcaaatttaaagtatccattgttcttttggaatctttcagtaatggaagtttattctttcacaggtatcacggttacatttatacataccgagtgtcccagacagaaacaggttcttggagtgctgaggtatagttgtatttatttttgcttctgggggtgtcaaggaggtatttgaaatttaggctggttttataaaagagcaaattatacattattaagtattcataaggtttaaatctctaaagctccaatccaaaattgttcatggatcattaagaaagctttagagaattttggtcccagtcctgtttagccatcattttgcagagttgtatgactttgggagaaagataaaaaagttgaagaattatgtcaaacttttagtgactatgtgaaatcttagcatatcaaaagtaggtaaaataattaaatgaacaattatttaccaaatgataccaatatgagtattggtatcgtgggagattaaaaaacatgatgcttattttctaagagactacaatatacttgggaagttataacttgaaattaaacagttatgagtggaagaaactaggctttgtcaacaggtgaatctgggttccaggtctggtctcccctcctctctgataggtctatgatcttgggcaggttacttgacttttctgtgagccagtttcttcatttgtaaacggagcctaagaatcctcccttatgcacaaggctcaatttgaaaagtaaataagataacacacataaagaagctgtttgccacaaggcctggcacacagtgagccctcaaaaaagtgaactcctgaaaattgccacaactcctattaataactcaatctgtgcatttaaaattttctgaagtctagacttcaagaagttaaaatagctctcacgtttactgatttatcagtaagttggaaagtataaattacagaccacaaatgttttgaaccactgagatgaattaggccaagttttcaaacacacttttgctgtattatgtaaggatcattaaaactataatactaactaaagataaagttataccatttctaattgaaactatttatacctgtttatttaaaaaattctctgtatcactgcagagatgattgaataagaaattaaactttattatgaagaaagttatgtgtaaaatatactgacaaacacacacacacacacacacacacacacacacacacacacacacgtttgtatattatttcgccagaaatagctcttctccccagagaaatacccttcagctgctgaagaatattatgtaaggaaaggatcttaaatgcttagggtttaacaactttgtttttcaacttgttttcctgcattttgagtataacatcatatgagattgttacatgcttgtgatcatgttaaagaagagagggcttattgaacacaaatgccccctcatcctgttgtctgatctgacgttgtttatgtaataatattgtaattttctgcaccaagagagcagaagattggcatgacatccgcaaatagaaaatagtttaaaaaattctttaatttttgaaatgcatattgcatttttttctatctactaaatttaccttcttagcagtgcttttctaaggtgaaaattaaactagtgtatattctcagagctcataccacctgactggaaaaaatttctctagagcatattgaagaccagctgtgatctaatacatgtttccatggataactaagaggtgacagtatgggagatttgcaaatttgaagaatagctgagttcagtgacaggatgagagttgtcagtggtacaattcttgtgataaatgtattttcgaaactgggtaaatgatagatattaatactgatttttggaacaatgttttagtttgccatgctgcaggaaaaatcaaggcagtagcatgccaccatctgtgcatatattatgctagaaatctaggtaagtgagatttgttttaaagagtgtaatgaaatcaaaccctggccccactgaattatgaaagacagatatcatgtgtttttctagttttagagagacttttaggttaaatctttgcctagtgtattatcttatatgactcagactaaaagtttgttacattgttaatttagataattccacaatctactttcatttattaatatgtgatttgttggcaatacattattaaaaatgtactgacatcaccctgttgacatcagtgtcttcaggctttactgggtatatgatcaggagatcagcagatgttaaataattgtccttattaatctaagtaaaacactgtaaaataggccagtcatttgcttatgaaacatcagatccccaattcaaatagcttccatacttccagtgctattattcatttctgttagcatggataatcaagtgttagctacatatcagtacccataaaaatgttgcttctctgttttgttttgttttgagacagagtctcactctgtcgctcaggctggagtggtggaatggcccgatctcggctcactgtaacctctgcctcccaggttcaagtgagtcctgtgcctcagcttcccaagtagccgggattgccaccacacctggctaattttcatatttttagtaaagccaggctttcaccatgttgcccaggctggtcttgaactcctgacttcaggtggtccgccggtctcagcctcccaaaatgctgggattacaggtgtgagccactgtgcccggctatgcttctgttgataaatgactttacaagccacaagaagctaaaaagatgtgtggtttgaaatctttccacactttaggtgtgtatagtttttcttctgtttgatgaccctagcttcgctagatcctgtttggcccagttctaatctgaaaggcaagagactgggtcctgggattctgagccagttctgcctctggttgtctgtgtgactttgggcaagctgattaatttctttgcattcatattttcttatctgtcaaatgggaataactgaatcagccaataactgccattttgtgaggaaatagtgaaggcaagagataggaatgtgctttgaaaatgaaaaagtgcactgaggaaagtataaggaggcaatttgtgcctatgacctgcatttgcaatttggagactctatcttggaaccaacgaactgtttggacttctgcaagaatggccatgttattttggatgagttctcaatcgagctttaggaaggtggagggtaggtgagagagtggggtggagctgggtgagagagtgttctacatctactgtgaacatatgggggaacactaatatagagctaaaaagaatttttgtcatgttttcaatgaaaaattaccccaacataaggaaatgactgagagttactatggatagtgtagtatgctatcttcagcataccactatctagctgacagaagtcttcatgctcgccttcatgttttctcattaaatgctaaaaaaacaaacagctcccacctcaaaaatctaccagatggaatagctgaaaaacaacttaaaaaaaaaactagtcattgttcaattgctcatagcaatactattttattttacgtaaaatgacaggtttgagctgatgcctgaagcttggctcataagcttttgcaggaaattgttgttgatttcaggcagtgtctttgcaagacaactgatgtcaggaaaggaacacattttaatagtcacctgcaaataactgtctctttaaaaacacacaaataaataaataaaggtgaccttatatagtctttcattttcatgtcatagagaaaaccttgttacagtgacgtgctgatggagagaacaattttgggagtatagggaagtttcccaaggaggaaaaaatttaatgtgaagaatggcgcaggaaatattgtgaggtgaaagagtatgaggactgaactagccgtgcactgtgtgcatcataacagccaatttttaatttcctgtgtagcattttatattgtgggatgatggcagggaggatgggttgttggtttttcttttgttgttgttcctcaggctttttattaatgacctgtaggatctgtttttttgtttttgtttttgttttttcctgtttaactgcatcccctctgttggtgaattcattgtgggtaatggcctgtatacccttagaggtttgagatgtctgatggggagcaggcaggaagggcagggcaatgagcaagagcttgtacaaactaataccacctttgggagaactgaaatgacagctcattagctcctcttgcagggaaattcagccaaccaaagtaagctcttctggaatgttgtttttccttcttccttatgttttcaaatatttcaacaagttacacaaatgttacttctcttagcatccctagcacattttgtaggtctttttgtatcattatgagataggtaaataatttgcttggccttttattttccagacagcacctggggtacataaaagatatttccggaaaataaaaaatctcatttcagcatttcagaagccagatcaaggcattgtaatacctctgcagtatccagttgagaagaagtcctcagctagaagtacacaaggtactacaggtatgatttcctcttaatttttgacagggtttggaagctcagagttatgagtcaacctgttcataaccatataatcaattagaagttatgtaagaaaaatgcagtgagaaagtagatgtagccagcaagtcaaatgagaggtgacaatttatgtgctataattttcatctattattctaataacttttaataaatctctgtaaaaacatcaaaaattctataagcccataacattttaactgctcttgtctgtctcatcttgttctttcctgtccctttaataggtagctaagtatgatttcacttcactaattcagacacaaataatgtgaaagatggtataattcagagaacacctgggctgtcctttatctttgcttagtaaactgttttttccttcagggacatgaaagctaacgttagcctggcacacatgattctgatttctgaattggtggtgcttgaattaatgacatttttctgaagcaaaggaaattaaatagtgcactttattgttccactggcacatattgttacatatcctgagcaaacctattttagtgtatgtgtcgtgctaaagactgaataccagccaatgtctgtagctatctgatacgtgactgtttactcctctattgaatggggtttatcatttgtttggagtaagaggataggccttgattgaaacaataaatatttatgataaaagaaaacgagtccctttttgacagggacctaggctcaggcataaactgacaattagactcaagtggtgaattaaattaatgaatagttagcctttataatacaaatgcaaatagagctctaatttccaagttggctagttgtttttttctgcctaatattccattctttataactcagttttaaataatagttgcttgaggtatattactgtgttgtgtcattgtgagttttatgcagttggaaattttataagtttgagttaatctgtaattttaatagtttgtaagtttattttttcttgatttttgttatttttctttagggataagagaagatcctgatgtctgcctgaaagccccatgaagaaaaataaaacaccttgtactttattttctataatttaaatatatgctaagtcttatatattgtagataatacagttcggtgagctacaaatgcatttctaaagccattgtagtcctgtaatggaagcatctagcatgtcgtcaaagctgaaatggacttttgtacatagtgaggagctttgaaacgaggattgggaaaaagtaattccgtaggttattttcagttattatatttacaaatgggaaacaaaaggataatgaatactttataaaggattaatgtcaattcttgccaaatataaataaaaataatcctcagtttttgtgaaaagctccatttttagtgaaatattattttatagctactaattttaaaatgtcttgcttgattgtatggtgggaagttggctggtgtcccttgtctttgccaagttctccactagctatggtgtcataggctcttttgggatttttgaagctgtatactgtgtgctaaaacaagcactaaacaaagagtgaaggatttatgtttaattctgaaagcaaccttcttgcctagtgttctgatattggacagtaaaatccacagaccaacctggagttgaaaatcttataatttaaaatatgctctaaacatgtttatcgtatttgatgctacaggatttgaaattgtattacaaatccaatgaaatgagtttttcttttcatttacctctgccccagttgtttctactacatggaagacctcattttgaagggaaatttcagcagctgcagctcatgagtaactgatttgtaacaagcctccttttaaagtaaccctacaaaaccactggaaagtttatggttgtattattttttaaaaaaattccaagtgattgaaacctacacgagatacagaattttatgcggcattttcttctcacatttatatttttgtgattttgtgattgattatatgtcactttgctacagggctcacagaattcattcactcaacaaacataatagggcgctgagggcatagaagtaaaaacacctggtccctgctctcagttcactgtcttgttggacgagaaaacaataacgataaaagacagtgaaagaaaataacgataaaagacagtgaaagaaaataacaataaaagacaaggaaaaaataacaatgaaagttgataagtacatgataagcgaggttccccgtgtgtaggtagatctggtctttagaggcagatagataggtcagtgcaaatactctggtccatgggccatatgaaaaggctaagcttcactgtaaaataataactgggaattctggattgtgtatgggtgttggtgaacttggttttaattagtgaactgctgagagacagagctattctccatgtactggcaagacctgatttctgagcatttaatatggatgccgtgggagtacaaaagtggagtgtggcctgagtaatgcattatgggtggtttaccatttcttgaggtaaaagcatcacatgaacttgtaaaggaatttaaaaatcctactttcataataagttgcataggtttaataatttttaattatatggcttgagtttaaattgtaataggcgtaactaattttaactctataatgtgttcattctggaataatcctaaacatatgaattatgtttgcatgttcacttccaagagcctttttttgaaaaaaagctttttttgaatcatcaagtctttcacatttaaataaagtgtttgaaagctttatttacctaatttgtcttgaaatattccttataattccttataaaatattcagagactgatgctattaataaaccaaataaaggattgatgattatcttatcggagtgattccctggaaaaggtaagtgcttttctgattttattgctgtccaagttcccggttgatgagcctacttcctgtcttctttggctggccttttattcatcaagtttttttttttttttttcaccttttctttcccaacatgagcatccttgctattttccagtacgtaatcacttgcacctttacagaaaggtcatatccttgctgtatctaaaatattgccatgctaacatattgtaagatgctgagtcaaggtagaaaaatgcacaatatatttccaagtgtgcagctctcttcagaaaaaaaaaaagtgtgtcagcaagcccaaaaggaacatgacagcttatcaaatacttattcatttcctctgaaatttgttcttaagagataaggtcagtagggagacaagcttaggtaattgtctgtttggctgttacaggcagggaacctttgtggtagtgcacaggtagaataagtctatagagaatgcctctgattaagtcctctgctataaataaagggctggatttaagatattctttcgggtagaatggacacagaattaaaaatgtgagaaacagctttaaactctgttaataatgtttcaacatcagcttatgttttatttgattcacttcgttaagcttagaatccaaagtctactactagtaaaacccagatttgcccttgagcatttcaaggttataggatgcctggtcttcctgttaggatgctatacattcaactttgacacctatgttttctcttgcagtaaatgggataccactattttgtagtttgcaactaggggggaagttaaactacccagtttggacattttcctaatttggggtgattggccaaacttgtagtaaaaggctgaattcttatcattaggtcatttagttcttaaatgaagattttttttttaatgtagcaagatataataaggctgactaactggatagagtccattaacatatatggaattgagatatatatatacatcttggttgcacacatacacgcagaaatagaactgttttctcacaagatgacaaaaggctatactacgtatcacattcagtattggacagagagagtaaaagcaggaatgcataagaactgatttttttttctttttctttttttagtcacctggtgggccatttaaacattttatttatttattttttaatttttattttactttaagttctgggatgcatgcgctgaatgtgcagatttgttacataggttacatgtgccatggtggtttgctgcaccatcaacccgtcatctaagttttaagctctgcacgcattaggtatttgtcccaatgctctccctccccttgccgcccaccgcctgacaggccccagtgtgtgatgttcccctccctgtgtctatgtgttctcattgttcaactcccactgtttttcatctttgtcactgattatccacgtgaccttaggtaagtcagtctgttactgttactgcatttgccaagtaggaataattaagtcgtactaacctcacaagattattaaggtacaataatttacatatatgtgtgtgcgtaattacatatatgtataactttaaggtagtaatattactgaatgtttaaataacattgactgatagtcacagatctctaaaagggagggtgaatagggaaggaatatacaaacgtctcctattataattctctctctataggagctcctgcccttttaaaaaataccctgagtgtgaggtgggatgcatattttgaaaaaaatttccagatgattgatactaacaaccccctacccccattgttttttactgatgggttgtgttgagatgatcaaggttgtcttctgctccatgagtcttttcactctctctctctctctctctctctctctctctctctatatatatatatatatatatatatacacacacacacacacacagacacacacacacacacacacacacataaaaaagcagcagggcattttgaagtggtgtaaattgcaggattccaagtttcagtaatgggttgtttggactacatgtgctccgcgagtatcaagatgaatttttgaagatctgttggccagatttcccagcgtcacttgtaaatgtcttcttgtgaaaaacaagtgccaaatggcaattgtaattgcataggatttttttagtgtttcatgattgcctcccctccctgacacccttccccactggctgctgccccaacatccattattttttgccagtgcatttggacaccctgaactcctatatatctctcccaccccgtttttataattttttattttctttctattgctgagaaaggcaccaaaaggagagggaagcctttttaaaggaagtcacagcctagaggcatttaaatttgcagcagctactcttctttgtttattaaatggtcacttgtgtcagagatcctatttgtatgaaaaataaaaatgaagagctgtctgcctaggattagtgactttttgatttctgtacctgcattttcaagatggtgtggttttattgttccctgttagtgagccacttgtcctatctaaggtgaccagactgatttgagaatgcagtttggcgcataaataaaatgggacacatttttcattggcaattttattttttaaaaatgaaatattcaaagtacttttctttcaaatatcaacacataatgtttaactttaaatatttacagcatgttgttgtgatgctcttgtagaaaaatgcatgcttctggcctgaaagccagagcaaaatgcaaaagaccatttaactgcagccagagaacatgaacctgtacagtatccagtcacttttcagcacaggagagcaggaatacaaaattggaacctattgtttcctagcaacatggctcagaccattataacacaattttcaatatgattagaacctctacctgttgttatacagaaactgaaaacttggcatacactgtaaacatctttacttttcatgagaaagtaagcagctaaaaagaatgtttttctgacataaaggctatacttctctttttcgccttctttcttactgatgcttttgccagaagaatagtaaagatttagacgttgtcatgattcatacaagtaaaatatttttcaaggacacaatctgatatactaacatttatttaagaggttaaagtccaccactaaatctaaggaaagatttttaactgccaaacacatttcctttgacaaataatgtaagatgacaactgccaagacaaaatccacagcaagtttaactctaagtattttcagttactgtttagaaagtaatttcttcttatgaacagtagtatatttggtccttaatagctttcacatgaaggacacactgaaaataatagtcactatttatggttgaattcttttttgttgtttgttttctgtatttttaaattttactttgcttttttttgtttttttgttttttgcgctttttttgttttttttgttttgttttgttttgttttgttttctttgcagaagaaagaacctttatagaaggctgtggaagagctgaagtactagtcaggtcagctatgtgtatgtgaatttcttcaagaaaacaggaatgttccattccatctgtagccttatgtctttccacaagctatatataatatgctccaatgtctccaaaattttcttttcaatacttcgttactgtacttttgcttctattaccaatgaactccattacaatcacccttacatgaacacatcttcataaatgcaaaaactttgccctgactctcttaagtgatattatagtggggcctggtctagttaaaaatatatttttaaagaaaaaaaaaagaaaaagagtcaaaataacatgatggaatgcttgaaactgtgtcaacagtgatgaaaatgtctcatgaaaattataacttaatttcatacctgtctacataggtagcatgtgaattccaaattatacattgtcaagttttcatacatttggctatgttgtatatattatatatatgtagtctatatattatagatcttctagataaattgacagtaaaggacacacttattttatacattttttgggttaaaaataaatcatatacttatttatatggtaaaagtgttttgttgcaagttagtatgaattgagatttatttccctttccttcaggagtcatgcttctaatcaataacgattagaatgacaactaaaagtaaacatatttaaatgtgttaaactttgaacttttcagttcatttggatctctagactgtagtgcaagagtgaaaacaaaacaaaacagaaaagcacaaacaaaatgggcttaagtaggaaaaagaaacaaccatggagtattccctgcctccagcccagaatgttcttcataggagagtccaactactatgctctcactttaacttactcgaatggtgtgtggctgtgcagtgtcagccatctgtctgctgggtatgagaaattcatatgtttctctgaaaaatgcttttactttcatcaggaaatgcaaacgaattgttctttcaataatttaaactgcagaactgcaagtcaatgaaggcattctttctattcagctgaataggaagtgatatactcaatatctccatcttcttcttaagaaatgccaaaatgtttctcttcgatttactactgattagtagttttgttttttttttctttcctccctcaagctttaggagttgtaaaaagaataataatagttcaaggcagtattaaaaccacagctgtaagtaataaaaagtgcatttcctgaatataatacaaatgtaactttaacaaactaaaggcacgaaccaaccaaatacgtattacaaactagaaatgcacagttcaaggtaatcactattaagtaaaagcttcaaatatttgtttctaatggatatttaaagcagtttgaaaatgatacatcatcaatgaattgcaaaaacgtataattgcttaaaatataagcaaaatagactctaatattgacattttggatttgtgataaaatacataatcacatttatgaatgcactctctatatacagttcacaaattatttttccattaatttaaaagaacatcagaggttctaggaacttaaggtccatttttaggttggtgtggaggtattcaaattttcaacaagtttgttagtaattttagaattccattctgaataaatactgtaccattaatacaggcctgattcagaaaaaacccaataatatgattttagtatggattagcaatatatcaagctggtgtgtttccagttataaagagagatgagttcctcatgaattctgtctctcagaatacatgtgtaagtggtattctaacccgaaggttttgaaaatgaaatgtttgaatacacccttccctactgtttgccagggtcatttcctttcccttgctttcctttgtgtagtaggaggcagactcttgaaaaaccttaacatgagcttatgactttgcatattttcaaagaaactgtcatcgcaaagcaaggcaatgaccccacactgcatttaggtagcatctggaaagaatccaaactaacattccatcataaatttgccttcagacatagcaaatgttcagattcggtgatgaaagtgcagaagctggctcaggggaattttctacgggccacattgtgctgtcatgtattttcatttgtggtaacttacaattacacagcattttacaaactatctctttgtcactgggcacaaatcttccagctcaccaaggggcttgttttactgcaggattcctagagattgagaaactgcagctgatattaacactaatcctgacctttctccaaattttaaatgatcgcagaacaaataacccgtcctggaaaatagttattttcctaggcagtagagacgattaaataaagataaatgggtaagtacggagaacgaaaataactaactgtataaattattttagtaaaaatgagtctgcctctctatagttagttgaaatgttttcggttggaaaggatttacttgattcgatttcctgaagatggctgggagatgttcaatacagaattgtacatttgaaagataaatctaagtgggctgaaacaatgtggcagcaactgctgtgatgtttggtctggtcttccctttagtactttcacttaagtaccaggtctatttttttaaggttttggctcttatgaatttctgcagtagtagttaatgtatgtatcggcatcccagacacgtatgcctgctaaagcctttgtttgtttttgtaccagaatcatacttttaagtaaattaccgttcatgtgcacaaaaccattgggtcagtgtatagatactgaatcactaatgtgaaactatgaccaaaacacatcctatatataaatgagaaattcctacccaggttaataaaagctatgtttacatgataccaatacagctgaacaacttttagtaaaaaattgagtcaaaacaggtcgtgtgagagaggtcacgctggccagctgctttggtatcatgtacacacgagcaaatagcggctatacagtctggttaccacacccacagggaagcatggtagacagaacccagccaccacacgccaaaacacagcacaacaatatggcatttactttaacaagcaaggaggaataatcaagaaggaagggcaattgggtcctcactctaggagatggtggctgaagacattttacacctgtttttaagtttcctataacagatctggaaaacgtcaaagggctggcagtctttcgaaaggcaagtttcagatactattgcaccacctattcaaatagcccgtaagttctgccaacagttaaggatgaaactgcttctcacaatagagatagagaaccttgggttctttctggatattggaacatatgcatggctcggcaaattgaaagtggtgctttctgaaaactgtttttagctgtttgagttctacttgtgttattttgaatactgccacacaagaactaaaaatctctgtcatttcttaaagagtttaaacaaacaatattaaaataccatcttccgtcacattgaaaggcagttggatatgtttttcctccatatttacatatacagagttctgatctagaaaaccaatacaataaaccattttatgttttaaaaacaggcagtctttggtgacgcaaaggcagagatatttttgttacctcctgcctatttcgctctgtctcataaagtgaatattattggcactgtcagaaagttctaaatactgctcaacagacaaaacaaaatacccatcgtaaccttgtacccgcccagtgctcaaaagctgctgcttttccccttctgtccatgccctaatcccctcttccccctcttgcagccttctttgttccttagtccaggcctgggccactgcgcgctgtctggcaatctccaacacgtgattcttttcctcttcgacagttgtcccataccggatgttgaagcacagggctccatgctggagctgaatatctgcaaaccgtctagtcctcccattcaacacagaagtcatctgggacacagtgacattgacaccattctccagaatccgcctccccccagtgttaccgatgagcaccaggtcttcctccagagacccaagcttaatgaagtagtgagtgtccctcccctctatggtaaaatgtaggttttccaggtaatgggcattattgagaatggcagcaagccgcctgctatcttcattggctactcctataatatcagctgttactatgccatccttgatggcaaattttatacctttcccaaaaacagaagggacagcagcaaaccttggttgcttccctccttcaaggcaccgtccatcattgtatcggggagtcataggtagttggtccaaggaaatgaaattcctgagctgtttctggagttcacactgaatgcccaggatagtctaggaaagagaggcacagagcagatgcagcatggagttagacatctgtcagatacttggtgattgtggaaaggacaggcttgcaagtttgcttccttctctctttaatttgtcagtgagtgatttaaaaataagccagatttggaatctcttcatcagagatttggaaaagactaacaggtgactacctagcattcttatatcttggtggagttaagcataaggaaatacatttaaacttgaaatcacagaattgcagagctggaaggcactttaagttggtccagctctcccaaaacacagacattttattttcactgatttcactcacactgactagatgttattactacatgtagagtaatacttaggcacagtgaggcacaaagaaatgcataaggcatagttcctactttaaagagtttaagaccttataattaactatggcaaatcagccagaaattcattgatctttttatgtggacttaaaaaaaacctttttttttgggcaattttcaaacatactaagaaataaagagaaaagactaatgaacctccaagtatccattatgaagcttcagcaattttcaacattttgctaaatgttttttagaaggacttttaattacagaaagcatttacatctttacaaaaagggatgaatttataggacctatctagaacttcctgtcccttataattttttagacttaaatttcaaggcctcacacccaaatttcagttttattctatcaagcccattttgttttcgcaaacacagatattcatatttctttcagttgaaagaaaaagctccttattttcatttgtacctcatacttctggtgatatcatctgctgaatcttaaatgttttgatgttcctattttttctcaaaactgtacccttgtaatatttattatttttgcttcattgtgtttatgtattttttctttatcagaataattttattctgttattcccatgctcttaagacatcaacccctaaattattttacagttggaaatctgatgttttcgtgtctcttaccgaacaattttctctaggtagaatccataattgctcttggtagcccatttcagaatttttaaagtacagttcctctttcctcttatgtacctattgcagcagtcatcaagtaacctgttaatcttttttttcccccaaaactccaattctctgatcttttttctcatggagctttttttataccttctcattaattgtgcacgttttagtgaatattcaagaagactaaaaaatcagtaagcaaacatatgtatatataatttctgggtattgaatgcccttctgttgtttcagctaaaaggaggtgataaaacttttactaacctttccaggatcccactcttgagtttttgtctgaagccgtagaagctcgtaagttaattctaaattttctaattcaggtttgggaaatccaggtagtacattgtgtaattggaaaccaaatagctccaaccaacttctgatgtctgtgagacacaatattaaaaaaagaaaatgaaaaatcccatactttataagctttgttgaaaacttgaaagatacctctcctgccttcaaactgtttaggcaatagaagttaggaataaaactcctatttatttatttatttatttatttatttatttatttgacatagtctcactctgttgcccaggctggagtacagtggtgcaatcttggctcactgcaacctccacctcttgggttcaagcgattctcctgcctcagcctccttcctgagtagctgggattataggcatgtgctaatttttgtatttttagtagagatggggtttcaccatgttggccaggctggtctcaaactcctggcctcaagtgatctgcctgcctcagcctcccaatgctgggattacaggtgtgagccaccgcacccagcctaaaactcccctttatatggcccacactaaaacacctgatcctctctctacagggtagagtgttgatttgtggataaccctggattataatatcagcttatatgatgaaacaagaatcctgaatttttcttttacgaaattattcatataagcttgtaagagtaaaacacagaaacagctaaaaaatgtagtaggatgcaaaagtattatatgttaacatgcacgttttgctcactctagaaaactaaggaagacagcaaatgcacaataacttgcgggctaactgtcaggaagaggaagcatatttacaaaggcattgagattctgtgataaaatcaacagtactgagttactcaagtttagcttaaagttttaaatagtttaaatacctgtggtatactttgcaacatcttgaattttgccaactgggtagttattttcaaaggagtagaggttgaatggtttaggaaggaggttcaactgtttccatatgtgatgattaggcgttgtccatctgccagcaacaacatcataatccctttgccccaggtgcactaatttagtaaggaaatcatagagtcctccatgaaaaccaataatgacctgaaagtcagggtaagtgtcatgatagatatcgccataaggtgtgtatagtatctcctttatgacctgacctcggctgctgaacacagctagtggggtacctgtattatcacaggctacataatattcttcaccactgcttaactccatggcaataaggtgaccttggagatcataatacagagatgtaatctccgagcttgtgtggttgtacaaatgagtaactcttatggggttggtaaggtctgcataaaagaactgaaggtgctgccctaggctggacttactcgcgacacgtcgcccaagcccatcatagtaatactgcacagtccagccagaagccttattgtaggctttctgcagcaggccattagaattatattcaaaaatatcatttcccctctgcctcagaaagccatcttcatccattttatactgaatttctcctaatctggtgatgcggtctcggaggtcatatcggagaggagtaagacgagcactcttcccatggcttaagaggttgatgtttccattcagatcgtaactataacgccactgggttttgtcatttacagaaacagtctgaagttgcccatcagcatcgtattcatagaagtaccttgttatattggcatctactcctacccttatgtcacatattaccatgcggcccacattatcatattgaatggtcatccagtaggcaattgcctttaggatttcatattggacttcaatgacttgtccattggcactgaagattttggtgtgtttcatcactgtagtagttatgacctgatttaaatcgtaattaattacactgaattttccaaactgctctgttctgccagagacatcaacatatcggtaaagatctataggcaaaggggtttcattgattacagcttgcatgcttgtgactcggaaattgttgtagctgtagtcgaaccgtgcattcacaaggccttcttcactgaatctgaaaatctggcgtccaataagaggtcctgcaggaaccaaaacaaaaacagtaagaagctaggcgatcaatgtggaagagtcagaaaggtctagtgttattttatttagtactggtgcttttatattcataatacaatattagagactgatctctgatatcaaatgcctgggcatattacctcatggatatatattctcatagtggtaatcctcaaatataaaaaattaaaatactctatagttatagaaaattttaattatagaaactacagaagtaataacacatccagtagcccagggtgatgaaattgatacttcttgctataatcactgacaaaaatgctttcatttcatttaacctttgctacaaagtcagagggtcaggttttgacaaattccagcattaaagtaactggatttgggcattctataaacccaaagggtgaaatacattagaaagttctgacttgtgaagatattttgtcatcaactgaggcttataaaggttacacagggcttgagctagtttcagtgagacttatatcttgccgtttcatctttgagaagatttggtgctgagcaggaatgggtatacagttacactaggcacttggatttcaaattacttgagagctgaaagaaagaaatgcactatatgtttttaagaaatcagctttcatcagactataacatgctttacattttcaatgtcagataatttgataagtaaagtgaaagttgggttgaatgtgtgtagattaatgcttctatctcacactgtggtcagtaaaaatgtcataagaaaatagtgatgttgttgtacacaccaccactctttcacaacaaacctgtttgcctgtatctgattgtgcagatgaatccgtcatgcatcaggtgtattgtcttaatcactccagaagactcttcatatgttaatgtgacctgagtggtatcatagagaacctcagaaagccttgcttgcttggtgtacttgtataagactctgcgccctgtccccagatgcagggtctgtagcaatcggccatctcgactatagtcttggataaaagaagtgctactgtccggtggggtgtagatgttccggtagtagcccactgaaagcatggtttgtaagctgtgacgcaccatgctaggcatggtgactgagagcagacaatctggttggtcatactcaaagatgtaacgccgctggctgtgtaggagaagcatcacagactgaaacgagacaaaggcagaatagcatattatggacaactaaagttgaggcgactaaagaaaatacacattcatccattcaacacaaatcaatcaagcacttactgtgtgccagacactgtggcaaaccctagtggatacagtagtgcacaatagtggtgtctatcttcatgaaatttacagttttaatggaggagaaagacaagtaaccaagcaattacaatatagtgtgaaatgtgttatgacaggggagttacagagtgcttctggaaggcagaggaagaccagcttactcagacttgagagaccagaaaaggcttcttggataaagtggcatctgagttgagacataaagattgcctagggattgtccaggtgaaggcagggagccgggggcaggggtagggaaagagtattcttggcagagagcacagccttgtgagggtctggatatgaaaaagaacacggctttttcagagaatgagagaaattttgtgtggctagaacttgagtatgttgggagtggtgggaatggcaggagatgacgtcagctatgtaggctgagtccagatcatgctaggctttctaagccacactaaggagtttggattcaagtatgttggcaacagggagtcatcgaagggtttctattttatttcatttttttagagccagggtctcacggtgttgcccaggctggagtgcagtggtgtagtcatagctcactgcagcctcgaactcctgagcttaggctatcctcctgtctcagcctcctgagtaactgggactaccaatgtgtgccactgcatctggcactcttgaagggttttaagcaagttaagggacggttgcaagagggcacttgcaagctgggagaaactgtcaagttggtattttagaaaggttacttcaacgtgcatatgtttcagaggaaggtaaatggatggcagggcatttcacaaattaatttatagttatcataaagtattgattgacttcacatactagatgtcttcctaaaaattgtgcataaaatattattatggcactattaatgttttgcaattgatgttttaacttcacatttccatttgtgttttaatattagggaagcatgtcattaaaactgaatgattctctggttatgcagcccctctcccccaaactgatctgtattttagaaacagttgtttgttgaggtataatgcaggtaacaggtgtttcataaatattgattgtcttgttttaattctaaatgcagacataaaaggagcactgttttagggaggactctaattgactgacatgtgcatctcatcttttaataaaaataaaaatttctcatccttggagattctgatatgactccctagaggagctttatccttcccctttagaaaattaccttttcaagcaaagagatttagttgagggttatttattcaagtttgtgttatgaaaacaataggtatattttcattttctaagcacaaattatataaatatttatgaatgtgaattacacaagtatatgtaatgtacatttatatcttctaaatatgacattacattctaatattgaatgtgctttctgaaactgcatatcctccctacccttctgagaattattgactttgaattgcatttcagtaccatgaagtcaaagtcagtggttatttgctcatttgttcattctttcttttccaccaacattacgcctgcagagccagaggtgagtgcagaaatcctgtcaattcgtcacttgtggacaacctgcagcttgccacagcctacagttccaccactgtgacctctgaaaacctcctgaacaaaaggaaggagacttggaaatcctgaatgggcttggagacattaagggagaactgcctccctggaccaaggcagaattcaatagaaccagcaagaaattttcctatgaatgggaaagcaggtggcagggggcaggggtggaaaagctttgtacaggaattgtggaaaagcttttgcattatctctagtctgaaagtcacatttctcagttcctttccactctcttctgtcaacttgctgtgagtaaatgacatctgtcacctgtgacacgggccagggactatcaccatatggcccccacacattatctagtaccagcctgcctgggccatgccttttccagtcactgtaccagcctttccaagtatttatggcacgtcgttgttattctctcctctgttcccatcctcctgcctgcagtaaaccactgcctgaaccgtgttcctaggtggtgctgatgctgggctgtctcaaaagcccttagtctgtttcaaagcttcctgccaatggcaagaatgtggatgatgtgattagaaatcaaatgaatgtaactgttacattgccaaaataccatttagctctcatttggctgctttttcactttgggtgggcattattatcagtttgctcaaaaacagtgcttatgaatctatccaatgtccacaatgctgttataggataaaaggccatttcttattagtccaaataacagagtgggagacttttattcttttaattgattgtgaggttctaaaagagataattgtaaaagcaacaacaacagcaacagcaatcatggctgtatgcttatttgaacaagactagaaatgagagcagaaatttgaaaagttaaagcatttgaatgaccaccagatggcagtgtggggccacctggaagctgaagccaaagtcgtcgttctgtctctctaggcagcctctgaaagtgtcagccccaaagaggcaattgctgtaaatgtataaggctaaagtatcttattaaatgattataaaatatatttaaatgcattttaaaaatgaagttcataagaattattttaggaaactgaaaggtttacatttactctaatacaaaattttagcccacaagtcttcaaaatataattaactcagagaagtctcataaatcaagacagagaattaatgaccacatagagaaaatttaagaaacaataattgatttttttaatagggaagagatcattaagcaaccacagccattacccaaataattatttttctcctaatggctacaaccattgtgcatgaaaatgatatgcataagtttcacttactctagaagaagtcaaactattttcacaaaatttctgcgtgttaaggtgaaaaatctgctgctgctttttaatacatcgtgacacaggtatggcaagcgaattcacaaggtaataccagagtattttggggtgtaaaaagagaaatccattttaaagtttgagaattcttagtttaaaatatactacaagaacgagcctctttatccctgctctgcccctgtcatagtgggagaatgtgccacaaaggccatattaatgagaggactggaaagaacacaaggagatacaaaacctcaagtcagtgaaaaagttacatgttacatgggattttggtaaattcaatgttctttccctttttccctctagaatcacaatttcaaagatgctttaatttcctccctccctccctgcctccctcccttccttccttcttccctcccttactttcttctgctctttcttgttttgatttacctccaagtggcagtaagtgctagctagcatttaaattctctacttgggtgttttatattaagttatttcatttaattatatctattcagtgaattagttatgattactggtaataataatgttaataaaatcaattttatgacaaatgacttttggaaagtaaagaatcgttccataattatgcgttctgtaggttctgagttttgcataacaggactgcttaaatcagtagctacccttttaattagagaacaaattaaatataaaatcaagaaaggaacaaaagtgaactcaaaggtacaaataagctggtttgtctcactggtcagaaagttaccaggacttgtcttgataccttattctgggtgaggaaggtcttatttttgtccactgcagacactggcagtctcaccgaggtttttgtttgtttgcttagcaattattgccaactacgtttttgtagcaaagagaacttgtgaagtttgcttcacgtgattctttgcttaagtaaatttgatggaataatcagtgaattcggaaaagagaaacaataaaatctcctcattggtgtcagagaagaggctaaataactgcacccagggatgaaattgaagttttcaataggctcttatgttattgtgcagatagtctaaagggaaagtcttttttttattattatactttaagttttagggtacatgtgcacaatgtgcaggttagttacgtatgtatacatgtgccatgctggtgcgctgcacccactaactcgtcatctagaggggaaagtcttatgagacctagatgtgactgtctataggcaattagctcagttggtcggactctggtgccaatgaggttggaattatgagtgcaatcctacgtatgcttctaaggagtgctggctacttaactagtcacatgggggacctgtggaaagattggtgcaaacctgtcttcctttctgaaaaactaactcagctaatattctgttagtgatcagtagcactgtttttttcatatgaaggtcatcaatatacaccttaagaaatactttgcctatgcacacataccagcaaatttttggattcagttaatgttgtaacaggcttggcattctgtaggcactagtcacacggttttgccaatcattcttgttaccaaaattcaaaagaggaaagacctgctctataagattcagattttgccagtgtagaggatagattatagatttgataaatatttctagcaaaaaaggacatgaggtggattcaccaaaggactccttccttttgccctggctcccaagtgaactctgcttcatctccaggcatttccaacttggtaaattctccagcaacaaactctgggaactagtaacatggtttgataatgacatataaccactggcacactatttttgtttaactttggggagggcgtatcagaaaagttgggcattatttggtaccaatagggaaatctgtcatgtgagctatgagctcctatgacttctctaagaacatctagaagctaccttgtactgattacccttgaattctcaagggaagccatttttcaatttttgtagaaattaatttaggactgatgaattcctaaatgtgttgaaagaatagatttgggaaacaagaggcactatcttaggagattagacattgagatagagatcaattactcttactgtcctctggtaccaatctggccagaaaccattttgctctgtaggggctgatgtttgacaaatggttcctgtagtgggattaaaatatttttctattattcccagacacaggccacaagctcccattatggatgctactggagactcagtgtacagaaaagagtattaccaatgaggccccactaccaccattcccgcaggctgattacttttggaaattagtcttcaaatgtatacaactaaaacttcactgactatcctaacaaaattagaattgcttatcctctgggtaaaaagccctttaccagagctgagtacattaacacaattttataattttctagctatttttccctcggtatgagctttcataataataaagataaccttttcaaaagcatgaacaaagatgttcaaatgaggagaaagctaagccgttattctgactttagtctgaaagagtacttggcagagtctgggactggggaaaattttcagctgaaaaacagtttatccttataagttcaacatctttttgttacttctacagaacagaacagctggaacacagacttttctcctgcaggtcctcaccaagatggacaattagggccattttcgatagtctcattcagaaacttgaaacttgtctttttcccctatgtacttactttttctaagtaggtatagctccaaattttcccatcagcccaagttcttgaaataattttcccactctggtcatattccattttttcattccacgttcctctttgaataaacgtcaccaatcccgaaggtgaatatgtgatgttcacttcattatatctgcttacaggagaccacagaatgggtcgcccagtctggtcataaagaattcgaagggtgaattttcgatggtcatcatagatctttcctgtgcgggttatatgatcaaaatctatggagagtaggtttctgttgtgggcctatgagaaagagatatgaaatacattttaagcacagccttgttcccctcattagagcactgacaatcatgaatcctttcctgattatccaacgatagagtctgtcttgcctctgaagcctcacggcttcacattccacagatgccacctgtctttattcctctaccacattgtacactctcagagagcagggctatgtcttaagtacttgaaatactctagactctcaataggtggttgttgattgctttttccccagctcaagccttaagtgcagtgccacagttttcagtaattatgtgatcttattttatgtaagtcagttgcctactaaggagtgggtattccttcacccttttcaccagtgaagtggccataacataaaagggtgaattatttgtgtgattagaaatcagacaaaaggaatacagtgagccccctctaacttatacagattcccttctttggtttcctcattcacctgggcttggagttttatatgatttcacacctattataggggaactcaggttgccttgccctctagttatggaatctcacttagcaatactttcacggaggcctgtaggtaaatgaactaagtgttggtaggtcccccagcattcacaagggcagcaccactaactgtggttaaagcacagagttaagtttggattccaagtttagaaacagtactttcacatgattctggttctagactttttctaccgtatggtagcattttctctgggcacctcaaaaccttgtagcagtcccagagtgatcctgattcaagggatcttgaactggattccatgaaagacagtattcaacggtgcctgactgataaaattcatctgggttcacacaagataaccaaataactaaatgacttagtaaaaaaaaaaaaagtttaaaaaatcagcagtgggacaactgacctgattttttccacgtttcagctggtagtgtcagtgtttgctagatctaccagtaacttctgctatgggtagctgattacaacacaatcacttagaaaatgcaatcctcaactgtttttttttgtgtgtgtgtgtttcagaaaaaaaaaaggtgttcttgattttagtcattaagaggttcagtccctgctggccagtgcactgaagaaggccctgtggaagaggggagctttgaagaaggcataggtggaaagtgcaggaaggaattttaaaatttattttattttagcttagctcagtttagttaagttttagttttagtgggttttatgttttgttgtgttaaaactttttatttttacatagtctgactcacaagaagttgcaaaaatggtagagttgctgtgtacccttcacccagcttttaggggacagacttctgatttgggtggagagagtcctagtgtatccggcaggaacaaaaacaagaatgaaaaaggagagactttgaggagtctaagtagcagtgaactgcagtcaggagacattcaaactagttacttgtctgtgcaccagtcatttcttccatctgcgccttagttttcttatctgtgaaacaagagtgatgttaccactttacaccacaaacttgtgctaagaattaaacgatattccatatacaggtacttggtaagctgtgaaacaacactagtaattgttatttgtataacataatgattacttttctcattttatttaggcttgtgaataggaccacatttcagattccaaggtgattgtagcttagtgtactagatttatatcggtaagagttgtcaacatgatcctgaatgaaatgttaaatatcttgttaatgaaggggaggagtgaaactcacattaggatttgactacattaatcatagtcagattaaactgattcactagctactcaactaaacttgatgttaattttaacttttgtggtcaaggatctgtttaactatctgaaagctatgcaatgtatcccaagaaaagtgcatataaaatgcatatatattaacatttttaatatactcttaggggggctttgaacctttctgaaaaacctaaacataaaaccttttcaggtctcaggaatccaagatcaacatcctggttcagaaagagttttgatcttagaggtctggatggctgcaaagctaatgctctcataccagactctggtcttcctttgttcagaatcttgtgctctttgctttaaaaagtaacctttccctcccacccccaaatataaaagagataactttttcatggcagaaaaattagaaatatagaaatgtacaaaggatataattacatgtaatccaaccatccaatgaaaatcactgttaacacttcactgtatttcatttcatttatcttacttttttggcataatctctgtgcatacatttaaaacatacaactaggattgtatttaaagttttgtgtcctactttttcagctaatgttttatctttagcattccttgtgttattcaatgttcttaaaatatactttttaatggttgcatgtcttactacatgataaacatttatttatctattctcccaattagaaatcagaaagtagtttttgtttttctctttcatattgcatgttttgctgaacatttttataagtaaatatttccataatacagaaccctatgagtgaaattactgggtcaaatgagacatgttaaaagacccctgatgcaacctgagagattactttatagtgcacagaggttgtataaattcatactcccattagctagtagtgggagaggctatctcagtccatccttactagcattgagtattatcagttaattaacttttcccaatatgagagtgggaaaatgatatgctgctgtggcttaaatttgcatttatttgattactactgaggctgaacactttttaacatctattggccacatgtgtatcttctataaattgtctgctcatgatatttgcccatttttctattggggtgtgacactttcctttttaaacctcttttggtttcagtttcttcattggtcagctggggctaatgttatttgcccttaattttgaacttctgaaaaaaaaaaaaagaagacctaccaaatgttccatgccatgaattgtatctggaagactagtggttagatgcttaaattatctgggggcaagtgccgtttgtgtcaggggtaggtttaattcagggagtacaaccacaaattgggactcttgactctttataccatctgtggccaatgcatgcagtgttgtcttgcatacatatacagccacctgttgttatgtgcttatgtgttgttatgtgcacctaaaaggtgataagaaaagcgcatatttcctgtcttttgatacaacgggcctggaagcctataggaaaccaggtgttcttgaactacccttcctgtggtttcacagccacatatctccaactgtaatactgttcatttacaatagctgtaaaatatccatgtactcccagagatggttgtaactgttgcaatttatgctataatgatagttaaagagccaaagtaacaagtgatttccagttcaactaaatttgtggttttatttgtctgatagattaagtttactactcaagaacacatttcttagtaaagtcattatagctacataagcagggatcactgtttaaaatccaccacaaagcaagcagaggacaactctgcctaatgttctttctctgcctgtcaagacgtctgccgctgtgcttctctgtttatggataatgcactctgatattccagtgctgctgaaacactagtttcaaagtcaggtttggaagttaatgtaaaattcggctaagagctaaaaaagaatgaaggaactgaagatgccacaggttcctccctgagtctcctggggaaaccatgtgtgagaagcctggcaaagagaatgcttttccagctgagcctctcccaaccttttttttttttttcgagccggagttttgctcttgtcacccaggctggagtgcaatggcacgatcttggctcactgcaacctccacttcctggttcaagcgattctcctgcctcagcctcccgagtagctgggattacaggtgcccgccaccacgcccagctaatttttttgtatttttagtagagacagggtttcgccatgttggccaggctggtctcgaactcctgacctcaggcaatccacccacctcaccctcccaaagtgctgggattacaggcatgagccaccacgccaggcctccaacctccttcttgagtgctcacgtgccaccagcctctatgataagaataagaactaggctgaacactacctactactgggtttgtgggcaaggctgagaaagctccacattcatacaagtgcttgctttcctgaaagatgatagcccttgacctaagtgtggaccatcaatctttatttccactcttgtttcagtattcaatctacactaatcctttccctggaaaagagaagggggggaaaaaaggattgaaatttgggaatagctccaagttaaaaagggtatctttggatagctgtgcattgaataaaacctttgagtttggcaactgacaggctgtgtggtgtggtaagaaaactgtttggtaataggtttttaataagggaagatggatctacgctgtaatgcatccttcggtttcccttatgtttttttcagctatactaggagacaggcctgattgttgttcatactaggaccagagaggaaagagggaagagtgtgctctggagagccacgaatagtgttgctggcagaaatgaaaaggcctgtaaaaagagggtatatggggaaaagcaaagccctttcctgctctttctgaggactttgtgttctaattgttcaagagaaaatcctttcaacccttctgatttgaaagtcgttcagttagaaaaataacattgtactacgttgatctaaaggcaattggtgatatttagctgtttttgacctacacaaagggcaatttgctatggttcaaccaactacacacttgcacacccacgcctgtgaatgtgctgaactctgagctatgatcactgcagttgattttctcccctccttaaggaggagaaggctgaattttcaagaacactgtcactagacaactgtgttacttgtttaatttttgctgaagaagttggaaggtaaataagtgagatgggccaaatagccacgtcagagtttggaagatcctgcatttaatttttttgtttttgtttttgtttttgagacagagtctcgctctgtcgcccaggctggagtgcaatggcatgatcttggctcaccacaacctccacctcccgggttcaagggattctcctgcctcagcctcctgagtagctgggattataggcacccgccaccatgcccggttaatttttgtatttttagtagagacggggtttcaccatgttggccagcctggtcttgaagtgacccagtgatccacccgcctcagcctcccaaagtcctgggattacaggtgtgagccaccgtgcccggcctcctgcatttaatttttatgaagttgtgagaatggatagaaaagtcacagttggggctgggcgcggtggctcacgtctgtaatcccagcactttgggaggcccaggcgggcggatcacaaggtcaggagatagagaccatcctggctaatgcggtgaaaccccatctctattaaaaatacaaaaaattagccgggcgtggtggcaggcgcctgtaatcccagctactcggaaggctgaggaaggagaactgctcgaacagaggagacggagcttgcagtgggccaagatcgcgccactgccctccagcctgggcgacagagcaagactcttaaaaaaaaaaaaaagtcacagttgatcttaaaaagtaccacatgctactttactctcactagttttaaggtaattagtatttgatttttagaaatcaatcactacattaattccacagatttttttttttattggtatctcttggtagacaatcaaaagcttacttaagcctacttttatttcacagagatgcctaccaatgaacagggcatatgttcagtactagcatcagcctctaatatttcacctggaattcccatttttttctttctttttgaaagagaactaaacttacttttaaaatagatggaataaatgtataatttctctagacattttattctttaaaaattatttcatatttaacaagaatcattgtatgacatttatgcaggattttctttttttctttttttttattttttggtgtatatgtgctttattattttaaaatcaactttatttggatagtttacacacagtaggagtcaccaattttaagcgtacaatttaatgagttttgacagtcattgaatcaggtaaccactaccacaatcgtgatagcatttccatcacccccaaaacttctcatttccctttacgtcaatttaacatccccaccaactgttttgtcccccatgcaggattttcaatcatttgtttacatagtgatagatttctagaaaagtttacatgacatcataataacctttgacacaaaactgcttgagttagaaggaacccttctgttcactcttatccgactacccactgtaatttacaatcacatacaactagttgtttctaattcttttgaagaatttgattcaataatataatgttttttactcccaagacactccctttactttgccagcatatagaaccttatcaacagaggggatcttaggaaatgggcttttgagccagactgcctgaattcaaatcctgtgatcactgcttactagctgtgtgacctctctgtgcctcagtttcttcatctgtaaaatgggaatgataatgataaacccatctggtaaggtgttataaatagtaaatgagttaatatgtggcagtatacatggtaaggcttcaaggaatgctaattgctgctgttatggttaatactaccactaataatatattgcaccatccatgtccctctttttatagatgagaaaagtgcaaaattatgggcataccagttcttcctcaaaatcatactcatttttctcacccaactttggctatattatttaccttggacattttttgcactatgctaatttgcccttgcttaagtactttgctgttgaccaattcatctgtgtaaccatacaacagatatttaaaatttttttataccaaatcattaatgctcatatacaggtgaaatggtatatgaaataattctttctttctagttatcttagtgaggttgatccaagattaacaaaaataggctaggcacggtgactcgtgcctgaagtcccagcactttaggaggctgaggtgggcggatggcttgagtccaggagttcaagaccagcctgggcaacatggcaagaccctgtctttacaaagaaacaaaaacaaaaattagccgagcacggtggcatgcgcctgtagtcccagctactcaggagactgaggtgggagattcgcttgagcccgggagttagaggctgcagtgagccaagatcgtgccactgcattccactctgggagacaaaaaacaaaaaaacaaaaacacaaccaaatatagcaggttctatgatttggaagccccaagaattcctggaccccaaaaatcaatactgcccagtagccttgatataggaaatctcctgtctccagggggctccttagggggaaaagcactgttacttgactgaaaactgcagatatatttttaaatagattaatctgattaatatatctccagtcaggctccttatctaaattttcacaaaataaatgcttccaccaaacctgaggagaaggaagttaaaatagtgtcaagtgaatgaaaatccaactctgagcaccctgtagctgaggaccaaggcaatttctcagaatagagggaaaggccagagccctcttggctgcccccaccaattccccatcatttgtcagcctgagaccctgtgttcaaccgagcttgtttctccttctcagctcacatctgaacactcacgtttcatttaaaaaccaacctaccctattctcagttatgtttgagtagaggaaaaaagtaaattgggagagttttagataagtccttgcttcatttcatttgtaaacacataataatcctacctgattttataattttggtcataaagtgctaagccccctccattgtttttcttttaataaaggaggctgcagttcagggattttgctataaccttacaactcagtctacaaaatcttataaacagctctgggatccaaagctgggatacatctcatatgacagcattgttatccatggacatagcaaggtacaaactggatgtagttcctaaaccagtatgcttttggtaaatgcccaattctttttacaattgcctctattgttatctgcactctaatttctctattgtccagggaaatgtatttatggggacagattgatgcagcagataagcagatacatggactagatgcaaaagtgccttgcaaggaaggaagatgagtcaaacacaactcaggttggagggaaatggattttttaaataaatgaaatttcaggatgttaatgtgacttatttcacttaatggagctggtgaaggatggctcagaggtaacaaatcccttgcctgctcaggctgagcagggtatcatgtttcccaaaagtttgcctccctcaccttaaaaaggatcctgacgttgcatgaaaaaaaatcactgattattctccaaagataggtctatccttttctgatttttttttctttccagctaaaaggtctgggggaggtgtgatcggcagcttttgggaacatttgacgtctatcatcttaccaaatgggcctttaaatgaacctgtcattttgtccttgaacaattagtgctttatggcctgcacacttgcaaattacaaccacacttttgtgtgggttttcaaaagggagccccatttcccacagtacagaaggggtttctatgttgtatgacttggaaattctgtctcaacagctctgatagctccacctgccctcagtctgaaatgacagcttcactagaagaaataaatgattcagtccaaggtattgaggaacttgagagcatcagagaagcttattctttggatgcttacaaatgggtcattgcatattttggtccaggaagagagaaaattggcatcagcttgtcccttgaaagctaccagaaatgaagggacgccatctcggaaataataacgtcagtgggggaagagaatttgctttgtcaaaattggattcacatgtcccttttgggagcatactcatttcattaaattggaaatgccaaatctggggaaattgaggcatcagcataaaaaaaatcactaggaatagggagatcgggtaaaaattaaccagttaagcagcctccttcctctttttgcctgcttcatgcttttcctgcctggaagccagccagttgtcctgtgcctcccacacttgccagtacattagagtcgattatttgtccctttttgtcagcattgaaatgaggagtcaggccctgccaaggtagctccactgagtggggcaatgatttatagattaattattttaaggaacaaggcagcacagtgtgatgcagtagaaagagtgccatgctaggtgaggacctgcattttagctctggctctgatccttaatagctggttgactttgggcaaatcacttaacctacctgggccttggtctccttatctgtaaattgaaagtaacaattgacagctgtggtgatcaaataaaatcctggctatgaaaccattttgttcactctgaggcactaaacatatgtaaatgattgttattgttattagacttctggggcatgccatggtaacaccacctggccaataaggggcctcatttttcagtcacaggacctcagggagtagcctagaagtgatatagagaagagggccttgaatttgttgcccttatagtccagtccgcaaatctgctcaactctgccacaggatcggaaatgggtcacattataattagtactaactaaacactttacttcttaacactaatgagctcccaaatgttttatgacaattagcttctcagcactaagaacaatttgggatatggggtgtaaattacagtttatagtttctctccattatctgtgcatatggaggacagaaaacaggatgggttgttctagaaaatggaaacttccaaggtcacataatataggatgagttatcctaaagaatgaaaaatcccaaagtcacatagtatatgatttggttcagaaagtttttttgaggctatatgctgggagaggtactaagaaatcatgtcttcaatacaatttttctgtgatgagtccatgaggtcgataagccatatgtagataattcttactttctctagtagtacacttttattttacaggtgaaaaaaaaaaatcaaggcatttcttaaagcgtttgtaaaatagggtatcaaggccaggttctctaacttccccatccagggttctacccaggaggtcctatttctcaaagaattccgatagaaatctttactgctacccacacattggtttgatatttggattggtttcacttctccattcagtggcatatctggtaaatattctgtcagaaacttgtcaatagaatcgaaacataaaaattgacttgtgcacatacaaatttcagtagctttataaaaaaaaaacccaaacaaaaccaaacaacaacaaaaaaaccacccactaaagtctgtggctgtgtgtcaccaagagaactgattgaaaagtgagcactggccgggcacggtggctcatgcctgtaatcccagcactttgggaggccgaggcaggtggatcacgaggtcaggagatcaagaccatcctggcgaacacggtgaaatcccgtctctactaaaaatacaaaaaagtagccgggtgtggtggcgggcacctgtagtcccagctacttgggaggctgaggcaggagaatggcgtgaacccgggaggcagagcttgcagtgagccgagatcgcaccactgcactccagcctgggcgacagagcaagactcttgtctcaaaaaaaaaaaaagaaaaaaaaaagaaaagtgagcactgctgtagattattttgttcatatcaagccatatgaccggtttgactgcctctctctggaattgggtggttgtttgggggttgcacttccacaaccttaaggttaccaaatttttgatatgagttctacatttcttttcaaataattaatatgtcagtatgttcaattctttgccttctacttttaaacttaacttcctcgtaaagcaacctttttcaattacctactccaccctgactcattccgattacctgctccaccctaaatcattcggatcacctgctctaccctaactcattcagattacctgctacctgctctgccctgactcccgccaaaacactcaccccgtcattctctttaaattagccaatcggaattagtttagtctgtgcggtctaaccctagccaataggggaacgacacagcaacacgtgcgtcagggataagagccccttcccctcccttgtccaagtgtgcactcaccattgctccatctgtaagggcgcacccttctatagaagtaacttgccttactgataattaaaaagaaaattttatattcgagtgctattccttttgcggcaccgaaactttatatataacagaaaccttcccggtatatcaggcgtgacacaggtgctcaaagcagatctggcctcaatagtgagtgattatttcccgcaggctggcagttgctctagggctgatattgaatgttactacatgtagaaagctggccacatcatcctaacactggttaacgttcaagaggaggcaggtagacagagtgctatggcgattgtaggctttgtgtgctgcagaaaagctgaccgaggtctcctggttaactctggtgaactgtgcttggtaaggactttaaaactccctaatctataacttcctccaggcagctctgagtacctcagcccaatctcagtaccagtcctttatccctctggccctggatatgtattcatggcaatgctataattcactgatttttcctcttgtctttgcccaaatgttgccttttgtctcacatccttttgtgtgtacctgcgaggtctttccaaagagctacctggaaagcagggacctcggtcaactcagtgaacctgatagacatctccagggcatgctgggaggggtgctggagggcctcctttgactaaacacatttctccagccagactttcttggtgaaattgctactattagagcactttagctggctaatgacaaagaaagctcctattagaatgctcatttaaggatactgaaccattatcggccattagcatcctcttttgaattagtatatcatataagccagtcagtcacttagaaaagctttggagaaatgggacttcagtttagggaggctctgcagttaaacaaacaaacaaacaaacaaacaaacaaacaaaacacctataaaagttctatatcttgtgtaaagtcaagccttaccctcagcctcctttcaaaagccgaaacattgcctttgttttgctccttcctctgccgccactcgatgaggtttgcattgtgctctccgggcaatgagatgttgcatttgcccagggtagggttgactgcccctgccaggatgtggggctctgagctgaggccgatctccatcccgctggcaaaagtgacacgcagggaaccatctggattcacccgataggtactttgagtattttctgtagacagaagagcaaaggaggaagagggggaaggaagggaagagcaggaagcagaaaagagacaggtttagttttaggaggcacgtttgggggataagcaggtggggtgctgtggtcctatctgccttctgggctagactaccgctctgacaggcaaacgtgttccctatccatttgggtcttgttattttcacagctggagtatctgtttcttggataaaagactcttgtctaacactgcaggctgtttttgtttttttcttttttcatttttaaagaattccctccctcactgacttgttggatcagcctcctcagtttgatatgctgggagctagaatgagaagagtgtgaagttcaacgtagcaccttaccacctgggcccaccatcacagttgccgtactccacaaaataccactaacaaaagttagtgtactcttagagtgtctggtgtcaccacctaacaacagaatgaggtcttaatgacagggcagagagaaagcaatttctctttgtgcacttgtcctctagcttctaagacattccaaatcctatctcccttccttcctttcttcttctgttcttccttacttttctgtcttcaaatataatgagtttttaattctctcatttcacttatattcttgcttggtctgtatcctaagattttcctttttcttcacccatgttggcattgatctagaatgccaagctcagctggagcccaggctccatttatttaatataacctagccagaccctgaaagacctttgcaaacagctgggtattgggaaataagttgatagcagagcagacttggcagggattgaacctcatgactcccacagagatgggcccaaagttgatgtgagaacttgtaaaaggtgtgaattttgtctgtgtttcaacttccatagctggaaaacaggaagagtacatcttctcagctagaggtgaattctgtttatgaatggtgtacgcaggtttcaaggtggatgttgacataggggctgttacagtcagatatcgttggaaacaatcttaccttgttttaaaatatatatggtactagttgccgtcaagttggttgacatgaggacattttcacggttggaagtatctagctccacttttgtcagcttctccaggtcactgtggaagctgctgacctctccagtgggaaacgttgcattggtcaggtgtccctcggggtcatacctgaggaatgtaaccaatcccagctttgaagcgtctcggcagtgataacaggactttgcaaaataaaaatcacttggcagctaatacagtttaactttgagtgataacaagtattattaaccttgttcaagaagaagaaaaaggtcagagagatgattaatcaaacgaaggtattttttgcagcttctgaattcttgataacttccttgagctgtgctgttttacagaaaaaatatatctggtaatgaatcaccagggtggaacactgatttatgaatcatgtcctgctgtgtgcaacgttgcagggaggcctccgtttgcgatttgggtcgatcccattagaggtgatggattacaaaacccagcagagggtgctgttgtcaaagcaaaagaaggtacaaaagggccctcaaaggctgagaagccaatatactgactttgggttatgatgggaaaattataatttgctgctgtttaagttgccaaatttgaaatgaatgaatcattcttccaacaaaatgaacaggcacagaggataatggaaacatgttcattaaaacattctggagccctctgatcttgatgtcacttaaattttaaaaatctttttagggtatagtacataaggttttgtaatttgtctatatgagtaagagacaaaaaataattacctgggataataggctataagctatatctagaaatatagtctagggagtttactttttccaaaaaaaaaaaaaaaaaaatcagaattattggcaatctcactgtcctccaaatgaaaactgcttccctgaaggcttttgatgtggagctgttcttttattgccaatagaaccatgaaaaataaacacttcattaaaagtaaacacatgtacttggaaacccattactgttttcttttcaagttgcaaattacaaaatatttaagcacttttatttgccttttaaaatgttaaacaattatattctttttacccaaaatgagcaggattcagcctggacacaatggtagagactggctgtactactccctcccccaacgattacacaaagtggcatagtaattcagtatcaatccattatattctaaaaaactcagcctgggtagttgctcaaattttaataactataccagcctttggaaggcttgggaaaagcagttggactgtactttataggacagacttgaacttgagcctatacataatgccacctaaagttcagttctgcatatacacgtgcgtgtgtgcacacacacatatatattatcagttaaaacagtcacatatgtgaatagaatgaatcaaataggttattgacatcacagatatgcctagccttagatgttaaattgggtgtctcctttgtttaaatggatttcagtcgaaatggttggcacagtgctattatgcagctaaggacgcgttatcaaagaaagactgaagagtgctgtttcttcctggggttaatggcaaaatccttccctctgcaaagactgcccacgttctgcctgctgtggggctctatagctacaagaagcagaagaacggagcataggaaggctcgaatacccactttagccccaaccttgtctgtttggtcttccatccaggggagaaaaacaataatatccagccttttttaaaaaaaattaattaatttttttgagacagtcttgctctgtcacccaggctggagtgcagtggtgtgatctcggctcactgcaacctccacctcccgggttcaagcaattctcgtgtcctagcctccctgagtagctgggattacaaacgagtaccactacatctggctaatttttgtatttttagtagagatgtgttttcgccatgttggccagactggtatccaactcctggcctcatgtgattccccctgcctcagcctcccaaagtgctggtattacaggcgtgagccaccacgcccggcccactgtccagccattattctcccaaggtagaggaggcaggagtttgcaggcagtagaccgaaggaagctgctgcatgcctttcttatcaggggaactgtggccccaacaacctggattatgcaggcacttcctctctgttccacatgaggcaccagcaactttgcctcattggtttccctttcctgatttctttctttctttctttcttttttacaatagtaaaactttttttttattattatactttaaattttagggtacatgtgcacaatgtgcaggttagttacatatgtatacatgtgccatgttggtgtgctgcacccgttaactcgtcatttaacattaggtgtatctcctaatgctatccctcccccctccccccaccccacaacaggccccagagtgtgatgttccccttcctgtgtccatgtgttctcattgttcaattcccacctatgagtgagaacatgcagtgtttggttttttgtccttgtgatagtttgctgagaatggtggtttacagcttcatccatgtccctacaaaggacatgaactcatcgttttttatggctgcatagtattccatggtgtatatgtgccatattttcttaatccagtctatcattattggacatttgggttggttccaagtctttgctattgtgaatagtgccgcaataaacatacgtgtgcatgtgtctttatagcagcatgatttatattccttcgggtatatacccagtaatgggatggctgggtcaaatggtatttctagttctagatccctgaggaattgccacactgacttccacaatggttgaactagtttacagtcccaccaccagtgtaaaagtgttcctatttctccaaattcaacaacccttcatgctaaaaactctcaataaattaggtattgatgggacgtatctcaaaataataagagctatctatgacaaacccacagccaatatcatactgaatgggcaaaaactggaagcattccctttgaaaactggcacaagacagggatgccctctctcaccactcctattcaacatagtgttggaagttctggccagggcaatcaggcaggagaaggaaataaagggtattcaattagaaaaagaggaagtcaaattgtccctgtttgcagatgattgtatatctagaaaaccccattgtctcagcccaaaatctccttaagctgataagcaacttcagcaaagtctcaggatacaaaatcaatgtgcaaaaatcacaagcattcttatacaccaataacagacaaacagagagccaaatcatgagtgaactcccattcacaattgcttcaaagagaataaaatacctaggaatccaacttacaagggacgtgaaggaactcttcaaggagaactacaaaccactgctcaatgaaataaaagaggatacaaacaaatggaagaacattccacgctcatgggtaggaagaatcaatatcgtgaaaatggccatactgcccaaggtaatttatagattcaatgccatccccatcaagctaccaatgactttcttcacagaattggaaaaaactactttaaagttcatgtggaaccaaaaaagagcccacatcgccaagtcaatcctaagccaaaagaacaaagctggaggcatcatgctacctgacttcaaactatactacaaggctacagtaaccaaaacagcatggtactggtaccaaaacagagatattgaccaatggaacagaacagagccctcagaaataatgctgcatatctacaactatctgatctttgacaaacctgacaaaaacaagaaatggggaaaggattccctatttaataaatggtgatgggaaaactggccagccatatgtagaaagctgaaactggatcccttccttacatcttacacaaaaactaattcaagatggattaaagacttaaatgttagacctaaaaccataaaaaaccctagaagaaaacctaggcattaccattcaggacataggcatgagcaaggacttcatgtctaaaacaccaaaagcaatggcaacgaaagccaaaattgagaaatggaatctaattaaactcaagagcttctgcacagcaaaagaaactaccatcagagtgaacaggcaacctacagaacgggagaaaatttttgcaatctactcatctgacaaagggctaatatccagaatctacaacgaaccccaacaaatttacaagaaaaaaacaaccctatcaacaagtgggcaaaggatatgaacagacacttctcaaaagaagacatttatgcagccaaaagacacatgaaaaaatgttcatcatcactggcctttcctgatttctaaagggattcctcaacccttgacaagctcactctatcattcctccaggaaagctgaacttagatgctgtggatgcaggttccacatggactttccagcttgggggcagtttccttcagtcacacagccccttgttttaagggaagatctcatgtaaagatatgagcagtggttatatccactcatcagagcaagatgacaagatcagataccaactgggccatccatgcataggggtacaagggtcaaaattcccaatgaacctttgcagtgacctgtggctaaatctggtttcctagtccacccacccaaacaccttttcagctaagttattggtggtctttgtctgataaacatttcaaagcttatttccaagagcacaggcatattcctacatattttgtacccatccctcctccccatattgacggtggtatattcagagaggcaagctaaagattcctagataagactgtaattacccagatagatttagctgggagactgcttggtgtatatgtgtgtgtttgtgtgtgtgtatgtgtgtgtgtgtgtgtgcacgcacgtgtgtgtgtgttttctggtgaaggaggcaatggtgttgggaataagatatttcccatgggtctgtccagttgttgggtagctggaaagttatattgcctcatttcctttctgtggccagagaggccaatgaaagtgtacatttgactgtaactccatgataaacaaagcaccccaactccaacacactcacataccccaattctgctagttcacagttaaagcaatcacatttaatggtatctgcagggtggtgtctctgatgctcaatatggccctggatcaaaacatacagatcccacctctcttctgttgggtcatttccaaaggaagaacaacaggcagatgtacacatcagcgggtaattcctacaactttggaaagattgctcaaagtggataagaaatagagcgagattttgatttcttatagcttacttgagttttttctgtcatcacaggggaatgcatctttccagactgagtgtcgaagaaacaagtttaatcaaaatctcttctgctgtgtgtttcccttcggtgcctccatcctttggtgcagagatacaagccgatatgctccaacgaatcccttcaggccacagcatgggagcaaacccaccctctttgcatgcagggcacagcactcacctaaccaggctgcaaattatagctgctgaattgtgccatcaggaaatgacagttgccttcatagccatcagaagtggatttggtaagaggagatttgttatcaaattgtcccttgctgtcctgattttacagagttccactgtgatggtctcagagggtaccagacagttaagtaatgagtacactcacccttttcctcagcactgtcataggctgtgtgcatgtgcacttgagtgagtgtgtgtgtgcatgtgcacacatgtgcaccccagtagagcaaaggaaacatttgtaaagaaaattcagaatccattcttgtccttgagaagcatatagtttagttggagagatgatatttacacatgattaaaaatatatttggcctggtattttctcataagggatagcttgccctttcctctgaggacaatttaagccagagttaaactgttcaagataaaactagaggctcccacacctttgctttaaaaaaaaattgcagataatagaagagaaattcattacttactcttttaaaggaaatatgaaagagtcagaccctctttacactttcatgtcagaaagctgaccaacctaataagaattctttaggaaatatgggattcccctttcctcactaataaattcctttggcttcctatgattcagttccaagtccataatgtccttctatcttcatttgtccttcattcaataaatatcagagtcttgtgctagggaccagggatacagtgctgaatgaaattcacagtctagtggggcagataagatatgcacacaaataactctaatgccagaatattgccatgaatttctgtaaagaagaaactagaatctcagaagaggcaaaggtcatttccagctgggctgagcagaataggaggaggaagagcagaagcaggtggtgtttgaatcctagaaggtaggtagagattgggaaggggaggaaggcattccaaatggaggtatgaagaaaggcacgctgactgatgggatgtctactgggggaccagcattgctggagcacagggttcctctaggagggtagtgagagataaggcttatacaataaagaagcatagacagtttttcaaggggataaaaggatgatccaaacagtgttttggtggcaatgagtcttggaaggggaggcaaggagcagggagaactgttaggaggctgcagacccagttcatatatgagaagatggtggtctgttgccttcgttaaatatattgtgattgcctatcattcagatttgtcttccccactagactgtacaactctcacatctttagagggaggacacagtgtctcattcatttttatattctccgtgtctggaacagagtagatctcactccatgtacttgttgaatgagtataaataggatgctgccagtgaaaaaaaggatgggggtggatatgagagccaatgtggttacagaacagacagaaccatcgatagtgcttctgggagggcacactcaggttacatagatgtgctatggagttcagcggaacttccctaccagcttctgttacttctgttcactctgtctttatttcagttcttcccagaaataccgacgataattctgttttactcactcttgatccttatcaagggcataaagcacaaggagaggtgactgagcaagggtgtcaactctctatttctaaagatctgaaggaacagccaacatttctatgttcttgtttaattgaaatcattcacctgcctggaggcatgtgcctgaaccatacaatgccttagttccttttctactctgggattctagaaggcattggaaacgtcacatgtgtttagaatgactgattattacataagcatttctgcatgggaatcgcatcctatccccaggcaaatatctcacccagagacatggcttgtttatcttgccccctaccccttctgatcttataagggagaagggggaatctgtcattagccatccatgataaaactgggcatttgtaaaacagtctagaagatacccagagatattatgaaggcttctccaacctgtcagtgggtggtgtttttgtttgtttgtttgtttgttttttgttttcttgatgggaggagaggatgtgttaataaagtctgaaaacagagaatgcagaagacgaaggatcaagagatcatgtaaacggagagtctccttcaagtgggagggcttcccacaaagggcaaggggcctgacgaaccgtcaactcagaatggaccagcagcagtgacacgactgatgctttggccttagtctgggaccttttcagtttagtagagcagaagcctttgccagggaaacaagcaagggcatcctggctacttttgcagccttgtggagaaaggcttgtctgctgtgcgagttgctaggcccctccctcagatctcagctgctgcggggttattacaattaggagcccacctgtgccgcctcaggccagtattcgtgccttgacaatcacttccttgttagctgtttctctgtggtcagcttttccccctgacacttgggacactcatgggcaatggtgcatcaaatactaacacttggggtgtgcaattttgatcctggtccaagtcaaatggaattatgaaaattagtgaactatgtaaacaacatcacactacctaataaaagcccaggcactaccactacacaagatgcattttaaaatcccatttggattatccactgttcagggtcatctatgtcatttttcctcctgatagctgcagataatagaaagttgaatggattagtgactggcctacctttacactgcagtcttccatcctgccaaatttcacttctgtttctgtttctctcatgctcctctcagagcagaacttatacttccacctgtgcaaacaatttgtccccttgtccacataaagaagcctcccttttacctcggggaattactcgagttcttttaggagggcctggtatcagtggtatagcagccttctaccgaccttagcactgctctgaccctgactagaagagtaggtcaaatgctgtgttctccaacttcagaaggacaagagaaaacttgaaggagtgctcagaactagccaaaggactagaggacaaaagtgaaaaaagtcagatattgtataaagactgtaggaggaattagtcacattatgaaggttggaaagttgctcatttctgtttacaggcaagaagggacaggagctgtgttttgttaaagactgctgttcagcaccagaatagactgcttcaggagaagaggtaccttctcctttcaacagatgctatttgaccaagagggtttcagtataattctggctggagttaagaaggtgggagaaagaacaaatggttattcagcctcccttttcatctcctggtgctacctattcctcttttactgctacttgaggggaaactttctagctctctagattttgtatggtcactctcgtaagcccacatgatcctctgttttctgttatcctgactctggataagccaactagcatgtgaatgggcacgttacttccctattctgggtttcggtttcttcatttgtaaaatgacatctaatgtctctttgtggccataaaatttcatgactacccccatgtggatgtctgtgtttctcatagcttagtggctcgagattggttactcaccaatgatgttagttgataccttttcactcactgttggccaaattctggtaacaggcctggaccccattcaccgtgagaatcttgcctaccacacagtgcctgcatcaatgtgatgccagtggaaaacaggcacacaaattgatatgacaacaaaattatcttctctcttcagcatcatcaattttcccctctatattagatcatttttatcagtatacaaatatgctgttatttctctcacttaaaaaactcttctgtttactctgtttctcctccagctctaatttctctgctctttacagcaaaactcctcaaaagagttctttactcactgtctcagtctctctcctcctagtcattctatattattattattgagatataattctcacaccataaaaatcaccattctaaattgtacaatccagtgacttacagtacatttgcaatgttgtgcaaccatcaccaccacttctagaacatttctatcacccccaagataaaccccatatgaattaaccgtcactccccattcattcttctccccagctcttggcaactacaaatctattttctgtctttatggatttgcctcttctagacatctcatataaatggaatcagaagggtcctttgtttctagattctttcactgagcataatgtttttgaggttcatccacattgtagtatgtatcagaacttcatttctttttatggctgaacactatttcatgacatggatatatcacattttgtttgtcttctcaccacttgataggcatttgagttgtttatatttctcagctattataaataatgttgctatgaaaatttgtgtatccattctctcttaagagaatattctactcaggctttggtccctcatgtgtcacagcgcctgctcttcacagtgctaaatcaagtggtcaattctaagtcctcatcttacttatcaggagtatttggcacagtggctcactctttcctcctggaatcacctgttttatttggtgctatggtctgaatttgtccccctaaattcaaatattgagactgaactgccgatgtgatagtactaacaggtgaggcctttaggaggtgattaggtcatgttgtctctgccttcatgaatgcaattagcaatcttacaaaagagctggagagagccagctaggtcccttttcactgtcccccttctgtcatataaggactcagcaggcagtgccattttggaagcagagagtagccctcaccagacactgactctgctggcatcttgaccttgaacttcccaacctccagaactgtgaaaaataaatttgttcttgattaattacccagtaaaaggtattttgttatagcagcacaaacagattaacacagttggcttccaggacattccactctcctagttttctttccacttcactggcctttccttctcagtgtcttttgctggttcctcttcataccctcaactcttttcttctctttctttttttttgaaacagagtttcgctcttgttgcccaggctggagtgcagtggcgccatctcagctcactgcaacctccacctcccgggttcaagtgattctcctgcctcaggcctcccaagtagctcggattacaggtacccgccaccacacccagctaattgtttgtatttttagtagagacggggtttcatcatgttggccaggttagtcttgaactcctgacctcaggtgatccacccgccttggcctcccaaagtgcagggattactggtgtgagccactgtgcctggcccatatcttcaattttaaacatggagtgcttcatggtcagtcttcagatctcttttcttcattgtctacactcactttcatggagagatctcatcccatctcatggttttaaatacaatctaaacaccagtacatctcaaatttcactctccaccctctcccctcaattctagactcatatatccaattgtctacctgatattttcacttagatgcctaactaaattgatcatatccaaaactgaattcccaatctcccacctcacaaccttccagtataatatgttccttgtatagtcttcccctcttggtaaatgaaaaccagttgctcaggccaaaacctttgaaggtatctctgacccctctttctcccacactcaatactcaatctctctataagtcctgatagctctactgtcaaaatgtattcagaattttagcacctcttactggcccaactccctggtccaagtcatcatcttttgcctgcattattgcaatagttcctcctgcttcccagttaggttcccctgtttccactacacagtccatttgtaatacagtgtgattttttaaaaaatgaaagttggcttatatcacttctttactcaaaactctccagtggctccacttcttagagtaaaattcaaagtctttacagtggcctacaaggccctacatgaagtagttctggttacttaattgatttcatgtcctcattaaccttactcattccacttccatcacaatggctgccttactcttccttgaatgtgtcaggcttactcctgctgcagggcatttatacttgctcttccctttgcctggaatacccctcataccaccccccaccccccagatattcatatggcttactcttacctcctacagatctttatgcaaaagtcaccttctttcttggtgaggcctttcctgtccacccaatctgaaataaaaacctcttctgctccacccacttgatctcccttactttactagatttttctccatagaacttatcaccatttgaaattgtatacatcttcctcatcttcctccagtacaatataagttccataaaagtagggatttttatctgttttattcatagctatatccccagcgcctagaacattgtatggtatgtagtaggtgctcatgtgtttgttgaataaatacatgaatggttgaactggttcttttgaaaactagttaatacttcagccatctcttgctgggggactgaattccaccattagctttcaaaatagttgtttgcctaatttcagctgcagtgtgatccggcttgagtttttaaaaaagacattaaaacttctcattagaaattttatcttttctaagggtagtatatttaaaaacacaggctcttgctggttgaatcctgggtatttatgtgaatcaggacaagttaactattttgtccttcagttttctcatccataaagtgggcatacttaggggcacctatcccatgttattatggggatcaaataaagtcacatatgtaaattacctagcccagtacctggcacttagtaaatctttagctaaccgtagcttttattactcttattaagatggaagagaattactttcaaaaaacagaggaagacttgcaactgaaacaactgaatacatttttctaagtgaaaccaaaatagctgtctggctcttttgtacagatggcatttctttggaaaatgatccaaaacttgaaggccaattgttttgtccctttcttcaagaggctttcatgggactggacatattctctatatcctcccaaaatagtcacacttggaaccccttatactttaacatctccacttctcacattcttcaactttgatgccattccagactctgaattcagattccatggattagctcactcagtatactggtaaaaaactcagcaattccttttgtggggaaaatgcttcccgagtgccaaaagaccagctttctagatgggcttacttgcaaacaaggtcatccatgccttaaaaggcaaggacaatggtctctatttctgtgttacggcacctcctagtagcttgctgtcagacacattttgtgttagttccccattaaacaaagttatcacagttccagtctataaatgccaaaatgtgctggattattcaacttgtgcagggaccctgaggaagcccaatcccgtacagagcatttggctcttccttttacagaagcagccaatggaatggagcctctcctattcagcatttgccccacataattcttctcttgctttccagggtccacttcttatatttgaacttctctcttacctcccacagcaacttatactgagctgggctgggctgggcatacattcatttattcattcattaaaccccacagggctcaataaatagttgttaagtcacactgcttctttgctgctttagaactacagttttgttatttaaatgaaattgtaccttatcttcccagggatgttgtaaatttcttgagtacttgtacttctacctcattcctgtctcctgcagtgccacacttgagtcttccttgatgcagtctgtttttattattatgctctgcaaactgctctggaaaaatgggtctgaactctaggaattaggtaaaattttctccttgacttttcattttttaaaatggtggttgttaggagaaaacagcatgcaacactcagcaattactaaggcattttcccagtataatacaatttcaaataaaaacctaacaaagcccatgtcaagaattagaaacttactcataaacggttgtccatccattttcgttacttttggtagccagaagccctgtgtttcctggataggtcattaaggccagattatagccttgggctgacactcttttcaggactccattgctgcttatagtcagccagtatacttgtccgccaggcaccacaagccatagcggcattccgcctgcatcacggcgaatgtgcactgaattgccattgctgctggtaatcgcgcccaagtcaccttcagaattgtaggtgaagttataaacatagtcccttgttatcaagttcagggtgtgtaggtgggttccatttacagtgaactggtacagttcctgatcagcgggtgaagcaatctcataaatgttcatgtcattcaggtgggcttggttcctgctgatggtacgaattcgaacatttccgaggtctgccacatagagggttccatcaggcgacactgctaaggaggaaggggctttcatctttgcatctttggcatagccaccatcacctgtgggagaaagacttgattttaacaattggcatcataagcatttacatgaacataccacagacataaagctctgtgcatcaagaatcattttaaaggaaacaatcagtgaaccaacattctctgtattccctccctgaaaaatatgaagcctattattcaaaagattgtaattcttgagtcagtaccactgcagatgaacagtaagatctaattatctcagttataccaattttgtgaaatcctcaatcctgctgttcagaatctattgtattataagaaacaagaactgcaaataatgatagccacacaaaatttggctggaaatctgagagttatgcctgtcaatgctttcaggatctgtttcaggactttccagtcctactgtgcctagatgccctttcttctgttaattcccattgtcacactgtcaaagtacactaagtctataagtacaacaatgattcagaacatcaaatttgatacctggaataaacattagatttgctttgaccgaaagatacaaattagcaaaatatctataaaactaattgtcgaagaaaacattggaaatattgatcaaaagtcatattgaccaaattgctcactcctgactcctctggcctaaggaaaggcaaaggttaagagaaccattcgggcctggatgaacagtttaatagcactgcgtgtagtatggagggatttccacatcccagcaataattgtatctgttgacattaagaggaccgtttgccatctgagatatccactacatgttttggggagaaggctcttttttttttttttttccaatttcgattagaagaaaacttcactatgggttattgagaaagtcttagctttttaaaaagcaatgtatctagcagaccaatgtcctgagaactctccattgccagatttaattttgctcatctatcccaaagacagtctgttcttagtccctttgagtctcaaatagcacatgcttttaatctgaaaaccaaccacttatggggaagtaattttttcctcagctaaaccagtaaatgtgggttttacctagttttcctttctctaaagtacaaatatttaataatatcatgatctttcatttgtatagtggtctcaactttttaagagtctaaacatttttattacactagtttatcctcagaatagcaaggtgatataactgagacaatgccatctttattaaacaaatgaagcaaatgagtcatgaagagatcttgcagctttgctagggtcactcagtgagtcagttgtgagaacaagtcggtgatctgactcctaatccatcgctttctccactagctcataccaatgtttgcaagtaacactttgcttttccttttccttttgactttactggggcacgtttttcttttcaaaacagagaggggaagctggtgaattgctaaaaaggtcatacctgaaaaacagtcacagtttggatcaattttgcagtcacagtcagtgggggcaccagcgatgatgtagatctccccattggtggttacttgctgaatgcggtttactttcctctcgtctgtttcagctatgaagagcagcccgctgtgggagacactgatggccctcgctgactctagagtggagtgaattgctaccttgctgaccaggaaatgatcgatgcctggcacctggcagtgaatggggcgtcctgcgatgatccgaacacgcctgttctcagaaatttgcagcacaatgttgttatccaagacatacaatgaattgtccataggatttactgcaaggtctgttggccactctaatcgcacctgtgaaacgaacagaacacataccattaggttaccatgtctttccatggacagttttaacttgaaaaaaagaaaaaaaaattggtgtattgtttcccccgtcttatgaattttagcaacattggtgatgtctcggaaagtggagggcagggggaggatggttaatcacatgttctggtaaacgtacttatcatttatgccatttacaatataatgtaattttttccaataatttcagaaggatcatttagagtagaggttttcaaagtgtgttctctggatcagcagcaacagtattatctgggaacttgtgagaaatgcaaattctcaggtcccaccctagatctattgaatcagaaaccctggaggtggggacccaaacatctgtgttttgccaaggtgattctggggatcattgctgtaggaattccggtagctatgatactcaaatctctctcactgtcctgtagacgtataggagagcaaagtcatacaggtttctgggtgacagaatgccagagaagccagattttactcaatgagcaaccttttgcaacaggacctgctattagcatagacctagcatccactttgtggaacactcaggtacagttcgtcagctgttgatttagaatcctggggtgtagcacactgcttacttagcttgacctggttcactccataggttcccctttttagcaaagaaacaggttgtttttttctttcactgagtattcgctgagtacctttctctgggttaagccttgtgctaagctttgggggctcaaaaatgactacgacacggcctctgtcctcaaatgatttgtggtatagtagagccctcagaggaaccattagacaattactctccacgttatgaaaagaaggcaacagaggggataagatagcacttcacctggactaggagtcaggaggcaagatattcccagagcaggtggtacctaagtaaggtctgaaatgaacagtaggagaagaattgggtggaagttgaggggggaggggcatcagagttgaggaaaatctgggtactaggaaaagcatgggtgaaagtccagaggttaaagacagcatggcccatccaggttactaaaactaattcagtaagactaataataggctgggtgtgagggagacctgagggatgaggccaggtgttatggactaaattgtgtcctccccaacttcatatgttgaagccctaacccccagtgtgactgtatttgtagacagggccttcaaagaggtagtttagattacatgagatcataagggtggggatctaatccaacaggactgatgtctctccaataagaggaagagataccaggaatgcttacgcacagagggatgactatatgaggacacagctagaaagcagccacctgcaagccaaagagagacacctcagaagaaactaaactcaccaacaccttgatcttagatttctagcctccagaagtatgagaaaatacatttctgttgtttaagccattcagtctatagtattttgtatggctgccctagcagactaatatatcaggtgctctggtttgaatgtgtcccccaaatatcatgtgttggaaacttaatcctcaaattcatatgctgatggcatttggaggtggggccatatccatcacctcaagcatttatcatttctttgtgttaagaacgtttaaaatccactcttgcagctatttgaaaatatataacaaattgttgtttattatagtcactctataatgctctagaacactagaacttagtcttcctacttagtggtagttttatatccattaagcaacctctggctatccctgtccaccttcccaacctctagtaaccactattctactttctgcttttatgaggtcaacctttttagcttccatatatgagtgagaacatggggtatttatctttctgtgcctggcttatttcacttaacgtagtgtctgatatggtttggatctgtgttcctgcccaaatatcatgttcaattgtaatccccagtgttggaagtgggtcctggtggaaagtgactggatcatgggggtgaagttcttatgactgatttagtactgtccccccttggtactgtatagtgagttctcatgagacggggttgtttaaaagtgtgtagcaccttccccttctctctctcttcctcctgctctggccatgtgaggtgccagctccccttcaccttggctatgactgtaagtttcctgaggcctccctaaaagccaagcagatgccagaatcatgcttcttgtacagcctgtgaaaccgtgagccaatgaaacctcttttctttataaattacccagtctcaggtatttctttatagcagtgtaagaatggattaatacggtgtcctccaagctcatttatgttgccacaaatgacagaattttgttcttttttgttgctaagtagtactccacagtgtatatgtaccacattttctttatccattcatctgtcgatagacacttaggttgagttcatgtcttagctgttgcaaatagtgcagctatctctttgacatactgatttcctttacttttctgaatcataacagttctatttttaattttttgaggaaactccatattgttttccataatggctgtactaatttacattttcctttctctgcaactcaccagcatttttttttgtcattctgataacagccattccaactggggtgagatgatatctcattgtggttttgatttgcatttctctgtttgaaagataattaggattagataaggtcataagggtggggtccccatgatgggactggtggctttataagaagaggaagacagacttgagctggcatgtttttgtcctcttgccatatgatgccattccaccatgttatgatgcagcaaaaatgccctcaccagctgccagtgccatgctcttggacttcccagccttcagaaccaagagctaaataaatgtttttcttcataaattacccagtctgtgatattctgttatagcaacaaaaaacagactaaaacattgggtaatagagggaagcacatgtccagttttgttttgatggctgtgggaagccactgaagggctttaagtaggggtgtgagatagtcatatttgggttctagacagatcatcctggctgctgtccagaccatattagagaaggaggcgagataggagggaggcaggcatttagggggctcctgcacgggcccaagttagggattatggtgcctgaactgggatggcaacaatgggtatggagaaaagcagatggatttgagacatgttaaagagttggaagcaaaaggactggtgtgtgtgtgtgtgtgtgtgtgtgtgtgtgtgtgtgtgtgtgtgtgtgtttggtgtgccttgtgccaagagatgtgctaggcactggagacatgcaggctagccaaacatggcttcaccttagttcctttctagacacaggagttgattcaatgcctaccctgacatctccttgacagtaactatttatccctaggtgtttctcagggaactgtgttccacaccattccccaccctaccactcacttgttctctatttcttttcttttaggctaaaggcagaaaaaaagtcccattcatggccaaaatagtaacagtaatgtagccacttttcttttttgctttgagtgaaagcccacagaaggctttgtttttcttgtggaatctgaaagtctgaaaacaaggtatgagctgtcattgcattctgcggcctactacttccccagctcaaagaggcttacaagcaatcagtaatgaagtggataaaggtcaatttgagataaggcctttcttctaattgtgtctcattagggagggcaactggtgatattgtgaagaggacaaaggttgtctttgacctcctctactgcaccatgtggggctctttgcccatgtctgagtctctcccatacatccagcagcctcattctgtttctatgtttctgtgtgccttccacctctatccacatagactggccttctctggtcagtaccagatgcttctgtgcagctaggaatttgagtgctaatggggtataaagctgagcttgtgttatgcatgttctacagagcctttcagactgaggccatcggataaacattaaacaccagccttaacagctcccagagcagtttgcggtgatgtgttcctcagcacgtctgtctgaggcctttgcatgtcagtgccctgccactgagagggagagtgaacgcctgctgctttggagggcgctgactcctccactgtgtgcccctgccttggacctctatacactatcatgcttgtccagaagctgtctgtgtgcactggtcctacggagcatagtcccccaggaaatgagctggggctggctgaggaagaggaaatgaattcatttccgtacaacactcccattttgattgagtctcaagtcagtgacccagaaaaaacaaacctggcagaaatgacgttctaattatccccactctgggagccgaggccagggcagaggctggggacagcacacacctggcagaagccagagaagaagcatgtttcagattctgtttttagctatcaaggctgcctctgagataaaggctggtagttgggaaataagctgttaaattctccaactcacccaaccagatttaaaccaatacgattggtgtcatgtttattatatttaattttgcctcaaaaatacaccagctattttgtctgtttgttttcttttccatggaataagtcaccctccggcatcttcctgtgactaaagtgccctttctgcttctgagccattttctatacaaactacacagattccctttaattcccatttgatttggccgggcagcttgtctatgcaatctccacagatgaaagatgtgtggctacttagtagttgagagtctgccttttcagaagctggacctcttcacctctcgtagcttgtcagttccttttatgtccttctcatgttaaatactcctattgccaggtaagttttcaaggaactggtgccttatgctcacacaacagaaatactgtatttactaccaagacattttcataacatacagcttaatataaggaatggagtctttgagctgattctgacagttagaattagtatctactagttgcagagagaccctagaattatatgatactaaggtggggctaaggttggcccccaattgctgctaccatttgtccaaatgatttcttggggtaaataaacacttcttttttgggggggtgggaacagagattgaagagcagcagcaaagctctgtaaactctgcctagtgacccaacctacaggcaaactatttggcctcatttgtggtggttgccacaccttgtaaaaatacattaatttgtttgaaatgtcaaaatgcatttaagctaaactagcattaaaggtcacttgtgtagccgccagctggtggaatgtgcctatctcccaacaaccttccctgagaaataaccctgagcataaaggagctcttggtcaggatgtcaacctttgacagcattacgtcttcctctgctaattgaaaacttgccttgaagggagttgactctcaggtcaaccagtcccatgattggtttagagatccagctaattttgacctaagtagcaatttataaagcagcagaatcctatagggagaaattcatgtttaaaagcaatatctaaatataatcccttggttagactaaactggaaaatgtctaaattatgtataagcctaatcccatactgtatgctcaaaccaccatttgtatacttgggctccctccaacagtttgagtcctggttcccacccttattagtatgtaacccttggcaaatgaggtatattctacgagtctctggtttcctcatctgtaacaaaacaaggaggctagtgatagtatatctacttgtaaagttattgtgtggattaaatgagataatggtgtaagttgcttagcccagtgcctggcacatagtaagggatagcaagtggtattaatagtaataacagtttttatagtcatagacctttagagctaggaggaacctggcccagttaccattcaatgtagctccttttcaactgtgtttcccagacttcaattgtccctgtgccacctttatgagttttgcctcacccctacatcacctgcactattattgacttaatattttgctttaaattgacttctaaaatgtgaataggtgctgccccttcctttgaactgttatgtaatcaataacacatgaaattacaggcccagtcatctgagccattaatagaagtgactactgtttactgaatgcctgctgggtgtcaggtacttcatatggtttaccacttaatataaaaattacctgagaaaaactattaacatctccactctcagatatgtgcttttagcccctatgccatctgattcgtcattcccaagactggacatgtttcttcattcttgtctcaccaaatctggcctccccttatccccttttgaatcaacctaaaggtttctctctttggctgtgaaggtcaagactttttatgagttgagtgatttatctttttctttgtcatctattatctttcagttcaatgctttatgagttttgaccacgtgccaggcactatgttataaaggtaaacaaacagatttctgctcttgattagttcaaggcagatacagaaatagataatttaacataatgtggttaagtgtcatgagtgccatgatagatgtatgcccagaatgacatggaaacacaatggagggagtttggggcaagattcctagaagagaaatgtaaacttaattttgaaggatgaagcaaaggtattgagaaaaagcaaggcgggaagggtgatcttggcagagggaaaagaatgaacaaaagtacagaagcatgaaatcatatgagagtgaaggaactaactgctgtctgggatttcttaggcataaaataaggtaggtggtagtggtgaatgagttctaaatgtttgctaggactaggtccaggttcctccactgaggctctgttgtcaggtggtgccagtcctgtgcattgtaggatgttcagcagcatccctgacttttacacattaggtgccagtagcaccttacccccagttgtggcaactgaaaatacctccagacattgcaaaatgtcccttgaggggcaaaaatgtctcttgctgagaatcaccgcattaagtcatggagagtggtatatgctgatagctttagacttaaactgtgtgtgttgaggagtctccactttaaagtggagagctgacatgatcagattagtattttagaaagattacttaggctgcattttgggggacaggccggaaggagaccagactagatgcaggataaccaatttggaggacagccattcattggtacattcatcccttaatatatccttttatccaaccatctgacagatatctgggtcctgatccagatagacatagtccctgccttcatggaacttggagtctgggacactgcttctcatacttttttgatttactcatccatttgagaatctgatgaaagctatgtactctctccctagaaaaaggcttcaatgcactagaaggaagtagttaggacctcaggctcacgagttaagatttctggagttgaaaattccatctgtgtcatttgctatccctgtgaccttggcacgaatcagttaacctatctgagcttctgtttcctcatttacaaattgaatatagtaacactatcttttcaaaaattattattggaattagataggaaaaaatacatagaccatctagcacagtgcttggtacattaaaagagctttgtagaggctagctatttttgaaaattatggaacatgtgtgtatttgtgctggtccctgtctattgttctgttccttggctagttcataaactcttaagtttaatcatatagtcatgctttcaaggtttctcttgattctatgtcaccagtcatttcctccttgtttatctatgccattccttgagaatctttctaagctatatgtcctccaagaaatatttggctggtattgggatatattatctcatatatatctgtcagccaatttcatggctaatattttagcttattacttgaactccccactgttaattgtaatagtactcttggtacaattccagctacagaaaatgctaccttaattgatttcctttcttctgtcaataaatgtctatttatctcatgttaggtaccatgctaggcactaaggagccagcttcagtcaggatagactagattcctcccctcataatgtttatagtcttttgctgacttcatttccttcatcttccagtatgtacaaggggttgttagtggcatagagcagtagactatttctgttccagtttattcattttaagaagttaacatttatggaagtgctcaaaaacatatcatgactgttactatattttacaattgtcaccaagtgctaataatttcttttcccaaagttcaagtgtgctgaagaaaccagttgtttcccaaaaggtcctgcctccccatttcaaacatgacacttctaatctccctcttttactacactgggagccttgtggctcatttaaaaaatgactctgtttgattttgatctgtgagtcctcttcagtaggaatttccaggaagcgtatgattatctcttctgtagtatgccagccctggggaagatacagtgacaggactgagtgctctctgccaggtgttatgccagctccatgttagatttttccgcacttctaaaagctgacaactccagattgttagcatcactttttgtcagttttcaaatggtcttctcatttcttgacactgatactctctgagcttcttcaaatgtataaaagagggaaaaagccatctggagaaagtttggttttttgcacttggaaagcatgatgacacctttaagagtgatggcctttattgatcttgcttttaaaaagtggaaattattagaagatgaaatacaccaagattacatggccttgtcaacagggcaaattatttcccattatcttagatacacactcttgtgtctctctgcataatggctggagagtttgaagaacctctcaacctttggtcaaatgcattggcatggtctgtttccatggcttcccaattagagtaactgacacttaagttgcattgttcattgcaaatgaatagctaggatcaatctaatcaagagtaacaatttggctgatcttgagaattattctactgcagaggatatagattaaattgcatctctcccaatgttcctaaaacattttggaagtggggaaaacaaagcaaagcaaaaccaaaccaaacaaagcaaaacttccaaagtagtcctagtatatttcatcttctaataatttccactttttgcaagcaagatcaataagggccatcgctcttttaggtgtcatcatgttttctaactgtagaaaaccaagctttatctagatggattttctctcctatttataaatttgaagaagctcagacaatatcagggtcaaaacaaaatgttaaatttgtggttcctaaaattcctgtggcagagactgctggttctaggcctattcttatattcactctttcctcctgattacactcccagtttatttatttatttgtttgtttgtttgtttgtttgagacagagtcttgctctgtcgcccaggctggcgtgcagtggcatgatctcagctcactgcaacctctgcctcccaggttcaagcaattctactgcctaagcctcctgagtagctgggactacaggtatgcaccaccacaactagctatttttttatttttatttgtatttgtatttttagtagagatggggtttcgccatgttggccagactggtcttgaactcctgacctcaggtgatccacccacctcggcctcccaaagtgctaggattacaggcatgagccaccacacccagccaactctgtttttgaatctgagtacattgctgtttagaatacaagacattccagccttatttgcaattatctgtagtcaagtgaagttccaggcaataatatgtaagaggaagtgtggaagcacccacacttacaaatagatacttaaaaaggctgcttaaggagagctgacccaagtggaaggaagctcttcttgccctttcttccattctgcaatgtggatataccagtgagagttctagcagatgtcatggaccatgaggtggccttgaaaatggaatttatgtgttagagtggcaaggcaaaaatacagaaacctggaacccagatgacactgcggagctgccatctcagccctaaaccacacatctagcctggctgctctcttgcttacatcactgtcatgttagggttttctgttattcttggttgaatctaatcacggggaagacagtgctctgttaggctttggtcttgactggagttactcactacaacattacattcaaactggtctaacagatttctagttttacacctctggatgaatcacctatgattggaaaattaaattaaactaaattgaaataaattaagtctgaaagagactgatgcatgtagcaaagtccactagggcagtgttaaggggatgactaattgcttaaacctaatgattaacctcaagcattcttgaatacctagggctccatctttgggtacttcaagctcttccagctccatgactccttcatttagatccagtacttctctcttattctaaaatacttgtttgtcttcctatgttctctaccaagactatgagttttcgacggcaaagatgagaactcttttatttttgttttcctagtatctggcattaagctggcaaacgtttgttgaatgaaaatattagtgcttcattgacagtaatgtttttggtccatgaaagcatttaaaaaaattataacatgcaaataggctctaagaaaaactatttctcatcaacatgtttgtgtcagtaaatctgggtttccagagacccactgaggttagtgtaaattgccataaatacctcaattttaagaaatgcatttcccactgcctccatactttaacttttctgaagtgaagatgtatcttatagtcaatgtgtatgtttgatggtacatttctccccattacccaaagatatcgaattgatgttatgtcttatagtccatggtgtcttagaatttaggaaatatggtatttccattttggtctggggagtctgggaattcccaagtctctttcagaaagtctatgaggtcaaaactatttttcaaataatattatgtgcattttgtactttatcatgtgtgtacagtggggctttccagaggctacctcaggctagtgtatcttcagttttaaaaaaaatcacacttttattttctaataaggtaaatattcataggataaaaccaacaaaagaatagctcgttggggcccccaacaatttttagaaatgcaaatgggtcctgagaccaaaatgcttgagaatggttatcctagaggaaagaaacagtgaaagacaccactctattatataagggtttccttgaagctcattaagaaaaaagcatatattcctcctaagatagttcctggggccataagtcctgtccaaaagcatactgaaggagtggctgaaaatcttcacttcctctagagacccaatgcctgatgggtaccataaaagtttgttcttacaggctgcctcagaacaatcagcacgtacacactctctctgagtctgctgtgtaattgccactacctcatcttaataacaggcataattgctctgagtttccgtcgaccctttcttgcatctcctctctgaagcctcaattttggaaatggcacttgtgaatacacagaatgtttaaccacttccagttttcaatttacagtcaaagtcatctatcagcaggagatgaaggcccagtgtgaaaactacagaatgtccttcagactccacagctaatttgtttgtaaatttgattgttattgtaaggagaacatattgtacatgatgctacttacatgatgctacttgccgatttactgtttgtatctctgtttctcgggttttatcattacgctaaagaactgaaccctctcagcccttctgggggtgggaagaggaatatgaaaatgttactatgtttttttattttgagtctctattttaatttaattttacatgaattcattaaatatctactgtatatctagcactgtgggggatacacatacagaaggagaggcaatcagagtacacagttcaaggtaataagaaatcaaatttgaggctgcgtgatgagcccataaagtctgagataattcagagtaaggacaggacctctgctggtcttaacacagtaggaagtgagactcttgtcctcttgagatccaaggctttgcttgcataggagccagagacttataaagaagcccctgaaatcattctgcaatttgtttctgctgagaagttgcagaaacttgtctgttgcaggttgttaatattatagtattggcttgacaggacagaccaagcttccaattccctttggcacctaaagcaatttacaggccagaagtatgactgcacagcttttatgaaatggtctgatttcattgatcagccactctgagattatgttttcatttctgtagctactgctaacccttctttctgttataatatttcaggaagaaactattaaaaattttcaccatggagatgttaagctataagtgggctgggctctgaatgggaaggtaaacatcacaactcatgattgttctactcaaaagttcatttcaagttatactagaattccacagattgtctctctcatcttaactctgtaatgtttccaaatgatagggacactaataagagcagatggcctaatgaacatttagagggaagatttaactggtggtattttcattaggcctccagtgtgcttccgggttttgcccaccacttccctgtgtgtaatacaaaactgcactcactcaacagatggcccagctcaagcttcatgcttctagaactctggagatcggccacctgaccacttaccatgtgtacagaatcatttaaggaagcatgcgggctatagacttaagcctgaacaaaagcaaaaaatggtgatgaatagtgagtatctgagcttcaataaaaggggaggcaaaatcaccctcacgaatagcaaatctggctgaggtctcccaataacaggttcttacagattcagtaatgatgaaatcctctgtgacaaacagtccactctaattaatgtttcatctaaactgtaagcatatctgagtgactccagcagcaacaatgacatgaaaatctaacacctcattgcacagtgtgctagttattaagctactgtctcacagctcccaactcacccctttaaagatgctgctttgtgatgctggggttgggactcggcaatctacatttttcttttgccagctagatttctgataggtcctgacgatacagaaaataaagagattctgagaagctaaaggagggagaagggacttgatccttcctgcttgctttctgttcctgtcagtgtcatctcaacagtagcccttcatcctggaagcagtacctgactgcacttccagctcctctccctaccctgagaatcagtctcattatgctgcctcagaggcaccagaagcaaccagctggcatcttcttttttttttttttgagactgagtctcactctgtcgcccaggctggagtgcagtggcatgatcccagctcactgcaagctccgcttcccaggttcatgccattctcctgcctcagcctcctgagtagctgggactacaggcacccgccacctcgcccagctaattttttgtatttttagtagagatggggctagctggcatcttcttctcagaggactaggtcctacctccatggagcaaattctccaactttctaggttctgacaaccccaacctcttccctttgtttccccagtcggagagatggtggccacttcctacagatattatctctatctcttgtttttttctgaccctgtaacatctgtacatcacattctctatattaaatcctctctgttaaaataacgaatgtactttctgtttttctgactgcatcttttttttttttttttttttttgagactgagtcttgctctatcccccaggctggagtgcagtggcatgatttcggctcactgcaacctacgcctcctgggttcaagcaattcttgtgcctcagcctcccaagtagctggaattacaggcacccaccatgctcggctaattttttttttttttttttttttttttttgtagagacggggttttgccatgttggccaggttggtcttgaactcctgacctcaaatgatctgcccgccttggcctcccaaagtgctgggattacaggcatgagccactgcgcccagcctctgactgcatcttgactaacattcacaacattaacccacatacaaggatagaggaacagcaatacactattgtaggtcagtggtaacagaaaactagtaaaggtgaactggaagcagcaaggactattttggccccagagactttgctatgaaagtccagaaatccactgtgcttggatgttataaagttggttgtgaatgattttatccagagcttctctgactctggaaatgccatgtttatgtcattattctctagaaacttctcattcttgcaatttttgagaatgatttcatggtcgatcatgtgactctcccatgttattcggagacacaattctgtaccaaatggttcatgaagttgccccgtgacaacatttcctatgtgctcaattgttaacagtaatacattagatatttactattaaatttcttttatattcactcttgctagttttcttgtcagacattgcaattactccttcagaatcctcttctcattgatttggagttggaagtgtgttttgagatgcgccaaatgaacccctgctctttgttatgtatctcaagataaacacgtttcaacaggtgtagcctgttggtaacattttatatgtccccatgtttacttttccaaacacaccaacttttgcatgaaaagatggcactcttgctgacagccaaataactttctctttgagttgtatttccatttgataaagaggggttggcactgattcgtgcactttcccctctcataattaatagagagtgggagtaggtttaaaggtacagtgtagtctgaaatttagttaggccaactggcttgcattgggactcagcacaggatgttatccctagaacctgaagacactaaccactgaatttacttctagaactcctggcatcaggtgatctgcttgcctcggcctcccaaagtggtgggattacaggcttgagccactgtgcctggcctctgactgaatcttgactagtattcacaacatcaacccacatacaaggatagaggaacagcaatacactatcgtaggtcttctgtatcttagagagatacagaagtatcttagatatttctgtatcttagagagatacagaagtatcttagatatttctgtatcttagagagcttcaggttcacctcaggtcatggcacctgctgagcaaaatgtgtggaagactgagtggttcaaaagcaggtttgcaagccttgcatcttgtgacttgccctgaactttgaagatgcttttcctctggtgcttaatagttttaataagagctaacgtgccattgtcctttgtgtggaaagaggacactgctgagggagttttatttatgtgataaattatgtttttgatatagcattgagcacggtacttgacttttattttaaggcccctgacaactttggctatttgcttgtgtgcagacatttcagcagaatttggatatgctggagctgaggatgttggcctgctgttctctacttatataaacaacctgagctgtcactttggagggagcaatggaaatatctctgataacaggttattatattgtgattttacctaagagatgcaggcctgaaaaacagttaaaaaaaggtttaaataaatttggagaaaggatacaatatttaaatgaactctgcggatagtctcattgcattgtttctcccagtttatcattttgttaaatttggttttttttatatatataatagacttaagaaaactgatagatgtgttggaaacttgaatatcttgataaaaacagaagtcattagttagatgaaaaaattcatagaccaaacttgcttcaaaaatcctaggatgctgctttcttcttatgatatatcagcttctttccttttgacttcccacttagctgggagcctttttgttttgtcttgggaaagtcatattcttcatagtgacctagataaactctgtcttctttcttatgtactctaatatttatttttttgtgtgtgtgaaattgacccacctagaatggctgcaggccacccactgaatgagctgcttttttacttcttgatttcaaagagatagaggatgatctaacatcttacattcacagatgtataaaactcatactacattccagcctcagctccatagtcatcacaacagtatgtgaaagtagaaagaagatgaagtatttggggcaccattcaatgactatagtgaacattcattaagtgatctagacagagcttcacatcagcactagggagacaaaacattctgggaaggtcacagcaggttaagaccagtctctggaacatgtttgctacagcccatcacactcacctacagacagatatatgcctctctgtaaaaggtacacctatgtgaaaaggacagaaaggaagattatataatttctctatcagttctaaacttcttggtcccttttagttttgtaagctatcagttcaattctcttttgtgagcagaaggtcaaatactactactactactattactagtaatagtaataataataatgataaaataataatctattgaacgcttatgagccaaacactttgctaagtgatttatgcatattaccacattaaattctcacaacctccctatggggaaagtaacattatcacccccatttacagatacagaattttttcccaggggcacacacctagcaagtggtggatctaggatttaaacccaggcagtctgtattcccataccattaagctttactgactttatatattggtataattatgaagaacagtctaccctaaaggcctgattttgtctcttgcatcctctattaaaggattagagaaaggtttggctctcctttgccgttccagaaggtgtttttctgcatttgacagagccaggagactaggtctgggttgcataagcaataaataacattaagcaaaaatgcatttaaattagagactgacaactacagatattcaaaatcagaaaaaccaccttgcagacttacttggttcttgtgtcctcccattttagcaagtgtatgatgaatcaacagaaaatacttcatgaagatgccaattaacatcttacatcatctcttttatttgtaaagcccttcacacttttccaagtgctttcacattaaaaaagagaggccacttaatcaacaattgggtcatttatttaattagccttcataaggaggaataattaaccagctccaaaattctagtgtcagtttttacatctagtactgaatccaaaattatacagaaccttcatttgggtcaagaaatagaaaaaaatgatttaacatttttttctgtattaccatctttcagaggagagcagaataaatgatacagaacgaaatgttatttttctaaaatatagacccggtaactacaaatagtgtttatttagcattattatgtaattttcagccataaactctaatggatctctcatttacaggtgagtaataatgtggagagccactagggactctgaaaaaagcctttttaaatggcttttggtgctgttgtcaaatcagagtctaaacaactcttcctgccatctcatgctctgtgacagcataatttgattgctatgtagactgaagtttgtgccactttccttccacatgcctacctaactgacatggcaaacgtacacataaaagccaaggttacatgtaatgccatatggtctcttttttcacttctgatcggctccaacaatttatagttgcaagtgcctttcaaaaaagaaacttccttcatgtgtgttttctcatttaactgacatgacctccttaggagacattacatgtttttatcccactttttattggtggagaaactcaggctcagagatcttaattaacttgtctgaggtctcactgcaaataaatggcagaatatggactcacacccaggattgtctatactccttctactagaacactcttagtcaaaggaaaataggtgaattaggcaactgtccagagaagtttggtaaaacatgcctctgtactcctgaagaaatatgaataattgttccaggcttataaacatgtctggtagaaagtttgctcatttttattcagtagtcatcactttctgatttaaatactttcacatttaaggtaattgacatattgaggtctttgagaagagtgtggctaagttaacaatgccttcctgctatggttgatgtagattgagctccctctttatcttgtaggaactaacaagcactcccatttctgcacttataatataagcctttggatc

SEQ ID NO: 145 - DNA, 1524 bp, human
cgcggaaccgcgggtgcgggcaggaggcggcggcagcagcgggaccgagcagcagcggctatgcatccaagtgcggctgggcagccgcggcacccctgaggcccgggaggggctccgggaacacagcgcggaggggacgctagtcgcggaggggacgctagtcccggagtgcgaggaagaggtgtagtgtccagagcggcggcggcggacgtgcgcacggagctgaggagggggcttcggagcgggactgggacggggggggcggctggcgcgagcagccctgggggtggggggcggggtgggccggcggcgcgatgctgggcgtcctggagctgctgctgctgggggctgcgtggctggcgggcccggcccgcgggcagaatgagacggagcccatcgtgctggagggcaagtgcctggtggtgtgcgactccaaccccacgtccgaccccacgggcactgccctgggcatctctgtgcgctctggcagcgccaaggtggctttctctgccatcaggagcaccaaccacgagccgtccgagatgagtaatcgcaccatgatcatctacttcgaccaggtactagtgaacattgggaacaactttgattcagaacgcagcactttcatcgccccgcgcaaagggatctacagttttaacttccacgtggtaaaagtctacaacagacaaaccatacaggtgagcctcatgctaaacgggtggccggtgatttcagccttcgctggtgaccaggacgtgacccgggaggccgccagcaacggagtcctaatccaaatggagaaaggcgaccgagcatacctcaagctggagcggggaaacttgatggggggctggaagtactcgaccttctccggattcctggtgtttcctctctgactggctcgtagccggaagggaggcagggagagggcgaaggcaggaaggggagtgagaaagaggctgaaattaagagggcgagaaagcagcacgacttgaaacttcctacatgttctctaactgtatctgggtaaaaaggtgcgcgccagctgtgggacaactttgtccatttccttattaggagaaataaatttcgcttagctctgcgcactcccatttccaaaaataaactcgcctcccccattccagttgcagtaatcaagaaagagactgccttgtcattgtttcttatcccccaacttcatgttccctgcaatttatttaaagaaactttgtatttcactacataatctgaaatctttctccctagccccctctggaatccttctgcctactgaaatctgatatattacacaccccccaacctttttttttcgagtttggaaaggggtaaagttttgttgttgttgttgttttgttttggatggggaaggtagttttaatttggcaagtgttgctcttcttaaaacactgctcaaattaattagctgaagatacttagtatcctcggctgcttgttagcagagaaaggactcaccttagtggtgactggtttaaaaaaaaaaaa

SEQ ID NO: 146 - DNA, 969 bp, human
ggatttccgggctccatggcaagatcccttctcctgcccctgcagatcctactgctatccttagccttggaaactgcaggagaagaagcccagggtgacaagattattgatggcgccccatgtgcaagaggctcccacccatggcaggtggccctgctcagtggcaatcagctccactgcggaggcgtcctggtcaatgagcgctgggtgctcactgccgcccactgcaagatgaatgagtacaccgtgcacctgggcagtgatacgctgggcgacaggagagctcagaggatcaaggcctcgaagtcattccgccaccccggctactccacacagacccatgttaatgacctcatgctcgtgaagctcaatagccaggccaggctgtcatccatggtgaagaaagtcaggctgccctcccgctgcgaaccccctggaaccacctgtactgtctccggctggggcactaccacgagcccagatgtgacctttccctctgacctcatgtgcgtggatgtcaagctcatctccccccaggactgcacgaaggtttacaaggacttactggaaaattccatgctgtgcgctggcatccccgactccaagaaaaacgcctgcaatggtgactcagggggaccgttggtgtgcagaggtaccctgcaaggtctggtgtcctggggaactttcccttgcggccaacccaatgacccaggagtctacactcaagtgtgcaagttcaccaagtggataaatgacaccatgaaaaagcatcgctaacgccacactgagttaattaactgtgtgcttccaacagaaaatgcacaggagtgaggacgccgatgacctatgaagtcaaatttgactttacctttcctcaaagatatatttaaacctcatgccctgttgataaaccaatcaaattggtaaagacctaaaaccaaaacaaataaagaaacacaaaaccctcaa

SEQ ID NO: 147 - DNA, 3386 bp, human
gccgcggccagctccggcgggcagggggggcgctggagcgcagcgcagcgcagccccatcagtccgcaaagcggaccgagctggaagtcgagcgctgccgcgggaggcgggcgatgggggcaggtgccaccggccgcgccatggacgggccgcgcctgctgctgttgctgcttctgggggtgtcccttggaggtgccaaggaggcatgccccacaggcctgtacacacacagcggtgagtgctgcaaagcctgcaacctgggcgagggtgtggcccagccttgtggagccaaccagaccgtgtgtgagccctgcctggacagcgtgacgttctccgacgtggtgagcgcgaccgagccgtgcaagccgtgcaccgagtgcgtggggctccagagcatgtcggcgccgtgcgtggaggccgacgacgccgtgtgccgctgcgcctacggctactaccaggatgagacgactgggcgctgcgaggcgtgccgcgtgtgcgaggcgggctcgggcctcgtgttctcctgccaggacaagcagaacaccgtgtgcgaggagtgccccgacggcacgtattccgacgaggccaaccacgtggacccgtgcctgccctgcaccgtgtgcgaggacaccgagcgccagctccgcgagtgcacacgctgggccgacgccgagtgcgaggagatccctggccgttggattacacggtccacacccccagagggctcggacagcacagcccccagcacccaggagcctgaggcacctccagaacaagacctcatagccagcacggtggcaggtgtggtgaccacagtgatgggcagctcccagcccgtggtgacccgaggcaccaccgacaacctcatccctgtctattgctccatcctggctgctgtggttgtgggccttgtggcctacatagccttcaagaggtggaacagctgcaagcagaacaagcaaggagccaacagccggccagtgaaccagacgcccccaccagagggagaaaaactccacagcgacagtggcatctccgtggacagccagagcctgcatgaccagcagccccacacgcagacagcctcgggccaggccctcaagggtgacggaggcctctacagcagcctgcccccagccaagcgggaggaggtggagaagcttctcaacggctctgcgggggacacctggcggcacctggcgggcgagctgggctaccagcccgagcacatagactcctttacccatgaggcctgccccgttcgcgccctgcttgcaagctgggccacccaggacagcgccacactggacgccctcctggccgccctgcgccgcatccagcgagccgacctcgtggagagtctgtgcagtgagtccactgccacatccccggtgtgagcccaaccggggagcccccgccccgccccacattccgacaaccgatgctccagccaacccctgtggagcccgcacccccaccctttggggggggcccgcctggcagaactgagctcctctgggcaggacctcagagtccaggccccaaaaccacagccctgtcagtgcagcccgtgtggccccttcacttctgaccacacttcctgtccagagagagaagtgcccctgctgcctccccaaccctgcccctgccccgtcaccatctcaggccacctgcccccttctcccacactgctaggtgggccagcccctcccaccacagcaggtgtcatatatggggggccaacaccagggatggtactagggggaagtgacaaggccccagagactcagagggaggaatcgaggaaccagagccatggactctacactgtgaacttggggaacaagggtggcatcccagtggcctcaaccctccctcagcccctcttgccccccaccccagcctaagatgaagaggatcggaggcttgtcagagctgggaggggttttcgaagctcagcccacccccctcattttggatataggtcagtgaggcccagggagaggccatgattcgcccaaagccagacagcaacggggaggccaagtgcaggctggcaccgccttctctaaatgaggggcctcaggtttgcctgagggcgaggggagggtggcaggtgaccttctgggaaatggcttgaagccaagtcagctttgccttccacgctgtctccagacccccaccccttccccactgcctgcccacccgtggagatgggatgcttgcctagggcctggtccatgatggagtcaggtttggggttcgtggaaagggtgctgcttccctctgcctgtccctctcaggcatgcctgtgtgacatcagtggcatggctccagtctgctgccctccatcccgacatggacccggagctaacactggcccctagaatcagcctaggggtcagggaccaaggacccctcaccttgcaacacacagacacacgcacacacacacacaggaggagaaatctcacttttctccatgagttttttctcttgggctgagactggatactgcccggggcagctgccagagaagcatcggagggaattgaggtctgctcggccgtcttcactcgcccccgggtttggcgggccaaggactgccgaccgaggctggagctggcgtctgtcttcaagggcttacacgtggaggaatgctcccccatcctccccttccctgcaaacatggggttggctgggcccagaaggttgcgatgaagaaaagcgggccagtgtgggaatgcggcaagaaggaattgacttcgactgtgacctgtggggatttctcccagctctagacaaccctgcaaaggactgttttttcctgagcttggccagaagggggccatgaggcctcagtggactttccaccccctccctggcctgttctgttttgcctgaagttggagtgagtgtggctcccctctatttagcatgacaagccccaggcaggctgtgcgctgacaaccaccgctccccagcccagggttcccccagccctgtggaagggactaggagcactgtagtaaatggcaattctttgacctcaacctgtgatgaggggaggaaactcacctgctggcccctcacctgggcacctggggagtgggacagagtctgggtgtatttattttcctccccagcaggtggggagggggtttggtggcttgcaagtatgttttagcatgtgtttggttctggggcccctttttactccccttgagctgagatggaacccttttggcccccagctgggggccatgagctccagacccccagcaaccctcctatcacctcccctccttgcctcctgtgtaatcatttcttgggccctcctgaaacttacacacaaaacgttaagtgatgaacattaaatagcaaag

SEQ ID NO: 148 - DNA, 2158 bp, human
ggagagaagaaaggagggggcaagggagaagctgctggtcggactcacaatgaaaacgctccttcttttgctgctggtgctcctggagctgggagaggcccaaggatcccttcacagggtgcccctcaggaggcatccgtccctcaagaagaagctgcgggcacggagccagctctctgagttctggaaatcccataatttggacatgatccagttcaccgagtcctgctcaatggaccagagtgccaaggaacccctcatcaactacttggatatggaatacttcggcactatctccattggctccccaccacagaacttcactgtcatcttcgacactggctcctccaacctctgggtcccctctgtgtactgcactagcccagcctgcaagacgcacagcaggttccagccttcccagtccagcacatacagccagccaggtcaatctttctccattcagtatggaaccgggagcttgtccgggatcattggagccgaccaagtctctgtggaaggactaaccgtggttggccagcagtttggagaaagtgtcacagagccaggccagacctttgtggatgcagagtttgatggaattctgggcctgggatacccctccttggctgtgggaggagtgactccagtatttgacaacatgatggctcagaacctggtggacttgccgatgttttctgtctacatgagcagtaacccagaaggtggtgcggggagcgagctgatttttggaggctacgaccactcccatttctctgggagcctgaattgggtcccagtcaccaagcaagcttactggcagattgcactggataacatccaggtgggaggcactgttatgttctgctccgagggctgccaggccattgtggacacagggacttccctcatcactggcccttccgacaagattaagcagctgcaaaacgccattggggcagcccccgtggatggagaatatgctgtggagtgtgccaaccttaacgtcatgccggatgtcaccttcaccattaacggagtcccctataccctcagcccaactgcctacaccctactggacttcgtggatggaatgcagttctgcagcagtggctttcaaggacttgacatccaccctccagctgggcccctctggatcctgggggatgtcttcattcgacagttttactcagtctttgaccgtgggaataaccgtgtgggactggccccagcagtcccctaaggaggggccttgtgtctgtgcctgcctgtctgacagaccttgaatatgttaggctggggcattctttacacctacaaaaagttattttccagagaatgtagctgtttccagggttgcaacttgaattaagaccaaacagaacatgagaatacacacacacacacacatatacacacacacacacttcacacatacacaccactcccaccaccgtcatgatggaggaattacgttatacattcatattttgtattgatttttgattatgaaaatcaaaaattttcacatttgattatgaaaatctccaaacatatgcacaagcagagatcatggtataataaatccctttgcaactccactcagccctgacaacccatccacacacggccaggcctgtttatctacactgctgcccactcctctctccagctccacatgctgtacctggatcattctgaagcaaattccgagcattacatcattttgtccataaatatttctaacatccttaaatatacaatcggaattcaagcatctcccattgtcccacaaatgtttggctgtttttgtagttggattgtttgtattaggattcaagcaaggcccatatattgcatttatttgaaatgtctgtaagtctctttccatctacagagtttagcacatttgaacgttgctggttgaaatcccgaggtgtcatttgacatggttctctgaacttatctttcctataaaatggtagttagatctggaggtctgattttgtggcaaaaatacttcctaggtggtgctgggtacttcttgttgcatcctgtcaggaggcagataatgctggtgcctctctattggtaatgttaagactgctgggtgggtttggagttcttggctttaatcattcattacaaagttcagcatttt

SEQ ID NO: 149 - DNA, 1653 bp, human
acgtccggggaggggccaggtgagcggcagacccggcacgcaggtgggggccggcggggtccgtggccagagctgcagagagacaaggcggcggcggctgctgtgctgggtgcagtgaggaagaggccctcggtggtgcccatggctggccaggatcctgcgctgagcacgagtcacccgttctacgacgtggccagacatggcattctgcaggtggcaggggatgaccgctttggaagacgtgttgtcacgttcagctgctgccggatgccgccctcccacgagctggaccaccagcggctgctggagtatttgaagtacacactggaccaatacgttgagaacgattataccatcgtctatttccactacgggctgaacagccggaacaagccttccctgggctggctccagagcgcatacaaggagttcgataggaaagacggggatctcactatgtggcccaggctggtctcgaactccaagctcaagcgatcctcccacctcagcctcccaaagtactgggattacaggtacaagaagaacttgaaggccctctacgtggtgcaccccaccagcttcatcaaggtcctgtggaacatcttgaagcccctcatcagtcacaagtttgggaagaaagtcatctatttcaactacctgagtgagctccacgaacaccttaaatacgaccagctggtcatccctcccgaagttttgcggtacgatgagaagctccagagcctgcacgagggccggacgccgcctcctaccaagacaccaccgccgcggcccccgctgcccacacagcagtttggcgtcagtctgcaatacctcaaagacaaaaatcaaggcgaactcatcccccctgtgctgaggttcacagtgacgtacctgagagagaaaggcctgcgcaccgagggcctgttccggagatccgccagcgtgcagaccgtccgcgagatccagaggctctacaaccaagggaagcccgtgaactttgacgactacggggacattcacatccctgccgtgatcctgaagaccttcctgcgagagctgccccagccgcttctgaccttccaggcctacgagcagattctcgggatcacctgtgtggagagcagcctgcgtgtcactggctgccgccagatcttacggagcctcccagagcacaactacgtcgtcctccgctacctcatgggctttctgcatgcggtgtcccgggagagcatcttcaacaaaatgaacagctctaacctggcctgtgtcttcgggctgaatttgatctggccatcccagggggtctcctccctgagtgcccttgtgcccctgaacatgttcactgaactgctgatcgagtactatgaaaagatcttcagcaccccggaggcacctggggagcacggcctggcaccatgggaacaggggagcagggcagcccctttgcaggaggctgtgccacggacacaagccacgggcctcaccaagcctaccctacctccgagtcccctgatggcagccagaagacgtctctagtgttgcgaacactctgtatgtttcgagctacctcccacacctgtctgtgcacttgtatgttttgtaaacttggcatctgtaaaaataaccagccattagatgaattcagaaccttct

SEQ ID NO: 150 - DNA, 4665 bp, human
agccagcccgaggacgcgagcggcaggtgtgcacagaggttctccactttgttttctgaactcgcggtcaggatggttttctctgtcaggcagtgtggccatgttggcagaactgaagaagttttactgacgttcaagatattccttgtcatcatttgtcttcatgtcgttctggtaacatccctggaagaagatactgataattccagtttgtcaccaccacctgctaaattatctgttgtcagttttgccccctcctccaatgaggttgaaacaacaagcctcaatgatgttactttaagcttactcccttcaaacgaaacagaaaaaactaaaatcactatagtaaaaaccttcaatgcttcaggcgtcaaaccccagagaaatatctgcaatttgtcatctatttgcaatgactcagcattttttagaggtgagatcatgtttcaatatgataaagaaagcactgttccccagaatcaacatataacgaatggcaccttaactggagtcctgtctctaagtgaattaaaacgctcagagctcaacaaaaccctgcaaaccctaagtgagacttactttataatgtgtgctacagcagaggcccaaagcacattaaattgtacattcacaataaaactgaataatacaatgaatgcatgtgctgcaatagccgctttggaaagagtaaagattcgaccaatggaacactgctgctgttctgtcaggataccctgcccttcctccccagaagagttgggaaagcttcagtgtgacctgcaggatcccattgtctgtcttgctgaccatccacgtggcccaccattttcttccagccaatccatcccagtggtgcctcgggccactgtgctttcccaggtccccaaagctacctcttttgctgagcctccagattattcacctgtgacccacaatgttccctctccaataggggagattcaacccctttcaccccagccttcagctcccatagcttccagccctgccattgacatgcccccacagtctgaaacgatctcttcccctatgccccaaacccatgtctccggcaccccacctcctgtgaaagcctcattttcctctcccaccgtgtctgcccctgcgaatgtcaacactaccagcgcacctcctgtccagacagacatcgtcaacaccagcagtatttctgatcttgagaaccaagtgttgcagatggagaaggctctgtccttgggcagcctggagcctaacctcgcaggagaaatgatcaaccaagtcagcagactccttcattccccgcctgacatgctggcccctctggctcaaagattgctgaaagtagtggatgacattggcctacagctgaacttttcaaacacgactataagtctaacctccccttctttggctctggctgtgatcagagtgaatgccagtagtttcaacacaactacctttgtggcccaagaccctgcaaatcttcaggtttctctggaaacccaagctcctgagaacagtattggcacaattactcttccttcatcgctgatgaataatttaccagctcatgacatggagctagcttccagggttcagttcaatttttttgaaacacctgctttgtttcaggatccttccctggagaacctctctctgatcagctacgtcatatcatcgagtgttgcaaacctgaccgtcaggaacttgacaagaaacgtgacagtcacattaaagcacatcaacccgagccaggatgagttaacagtgagatgtgtattttgggacttgggcagaaatggtggcagaggaggctggtcagacaatggctgctctgtcaaagacaggagattgaatgaaaccatctgtacctgtagccatctaacaagcttcggcgttctgctggacctatctaggacatctgtgctgcctgctcaaatgatggctctgacgttcattacatatattggttgtgggctttcatcaatttttctgtcagtgactcttgtaacctacatagcttttgaaaagatccggagggattacccttccaaaatcctcatccagctgtgtgctgctctgcttctgctgaacctggtcttcctcctggactcgtggattgctctgtataagatgcaaggcctctgcatctcagtggctgtatttcttcattattttctcttggtctcattcacatggatgggcctagaagcattccatatgtacctggcccttgtcaaagtatttaatacttacatccgaaaatacatccttaaattctgcattgtcggttggggggtaccagctgtggttgtgaccatcatcctgactatatccccagataactatgggcttggatcctatgggaaattccccaatggttcaccggatgacttctgctggatcaacaacaatgcagtattctacattacggtggtgggatatttctgtgtgatatttttgctgaacgtcagcatgttcattgtggtcctggttcagctctgtcgaattaaaaagaagaagcaactgggagcccagcgaaaaaccagtattcaagacctcaggagtatcgctggccttacatttttactgggaataacttggggctttgccttctttgcctggggaccagttaacgtgaccttcatgtatctgtttgccatctttaataccttacaaggatttttcatattcatcttttactgtgtggccaaagaaaatgtcaggaagcaatggaggcggtatctttgttgtggaaagttacggctggctgaaaattctgactggagtaaaactgctactaatggtttaaagaagcagactgtaaaccaaggagtgtccagctcttcaaattccttacagtcaagcagtaactccactaactccaccacactgctagtgaataatgattgctcagtacacgcaagcgggaatggaaatgcttctacagagaggaatggggtctcttttagtgttcagaatggagatgtgtgccttcacgatttcactggaaaacagcacatgtttaacgagaaggaagattcctgcaatgggaaaggccgtatggctctcagaaggacttcaaagcggggaagcttacactttattgagcaaatgtgattcctttcttctaaaatcaaagcatgatgcttgacagtgtgaaatgtccaattttaccttttacacaatgtgagatgtatgaaaatcaactcattttattctcggcaacatctggagaagcataagctaattaagggcgatgattattattacaagaagaaaccaagacattacaccatggtttttagacatttctgatttggtttcttatctttcattttataagaaggttggttttaaacaatacactaagaatgactcctataaagaaaacaaaaaaaggtagtgaactttcagctaccttttaaagaggctaagttatctttgataacatcatataaagcaactgttgacttcagcctgttggtgagtttagttgtgcatgcctttgttgtatataagctaaattctagtgacccatgtgtcaaaaatcttacttctacatttttttgtatttattttctactgtgtaaatgtattcctttgtagaatcatggttgttttgtctcacgtgataattcagaaaatccttgctcgttccgcaaatcctaaagctccttttggagatgatataggatgtgaaatacagaaacctcagtgaaatcaagaaataatgatcccagccagactgagaaaatgtaagcagacagtgccacagttagctcatacagtgcctttgagcaagttaggaaaagatgcccccactgggcagacacagccctatgggtcatggtttgacaaacagagtgagagaccatattttagccccactcaccctcttgggtgcacgacctgtacagccaaacacagcatccaatatgaatacccatcccctgaccgcatccccagtagtcagattatagaatctgcaccaagatgtttagctttataccttggccacagagagggatgaactgtcatccagaccatgtgtcaggaaaattgtgaacgtagatgaggtacatacactgccgcttctcaaatccccagagcctttaggaacaggagagtagactaggattccttctcttaaaaaggtacatatatatggaaaaaaatcatattgccgttctttaaaaggcaactgcatggtacattgttgattgttatgactggtacactctggcccagccagagctataattgttttttaaatgtgtcttgaagaatgcacagtgacaaggggagtagctattgggaacagggaactgtcctacactgctattgttgctacatgtatcgagccttgattgctcctagttatatacagggtctatcttgcttcctacctacatctgcttgagcagtgcctcaagtacatccttattaggaacatttcaaaccccttttagttaagtctttcactaaggttctcttgcatatatttcaagtgaatgttggatctcagactaaccatagtaataatacacatttctgtgagtgctgacttgtctttgcaatatttcttttctgatttatttaattttcttgtatttatatgttaaaatcaaaaatgttaaaatcaatgaaataaatttgcagttaaga

SEQ ID NO: 151 - DNA, 3107 bp, human
aagcggcaggagcagcgttggcaccggcgaaccatggctgggattttctatttcgccctattttcgtgtctcttcgggatttgcgacgctgtcacaggttccagggtataccccgcgaatgaagttaccttattggattccagatctgttcagggagaacttgggtggatagcaagccctctggaaggagggtgggaggaagtgagtatcatggatgaaaaaaatacaccaatccgaacctaccaagtgtgcaatgtgatggaacccagccagaataactggctacgaactgattggatcacccgagaaggggctcagagggtgtatattgagattaaattcaccttgagggactgcaatagtcttccgggcgtcatggggacttgcaaggagacgtttaacctgtactactatgaatcagacaacgacaaagagcgtttcatcagagagaaccagtttgtcaaaattgacaccattgctgctgatgagagcttcacccaagtggacattggtgacagaatcatgaagctgaacaccgagatccgggatgtagggccattaagcaaaaaggggttttacctggcttttcaggatgtgggggcctgcatcgccctggtatcagtccgtgtgttctataaaaagtgtccactcacagtccgcaatctggcccagtttcctgacaccatcacaggggctgatacgtcttccctggtggaagttcgaggctcctgtgtcaacaactcagaagagaaagatgtgccaaaaatgtactgtggggcagatggtgaatggctggtacccattggcaactgcctatgcaacgctgggcatgaggagcggagcggagaatgccaagcttgcaaaattggatattacaaggctctctccacggatgccacctgtgccaagtgcccaccccacagctactctgtctgggaaggagccacctcgtgcacctgtgaccgaggctttttcagagctgacaacgatgctgcctctatgccctgcacccgtccaccatctgctcccctgaacttgatttcaaatgtcaacgagacatctgtgaacttggaatggagtagccctcagaatacaggtggccgccaggacatttcctataatgtggtatgcaagaaatgtggagctggtgaccccagcaagtgccgaccctgtggaagtggggtccactacaccccacagcagaatggcttgaagaccaccaaagtctccatcactgacctcctagctcataccaattacacctttgaaatctgggctgtgaatggagtgtccaaatataaccctaacccagaccaatcagtttctgtcactgtgaccaccaaccaagcagcaccatcatccattgctttggtccaggctaaagaagtcacaagatacagtgtggcactggcttggctggaaccagatcggcccaatggggtaatcctggaatatgaagtcaagtattatgagaaggatcagaatgagcgaagctatcgtatagttcggacagctgccaggaacacagatatcaaaggcctgaaccctctcacttcctatgttttccacgtgcgagccaggacagcagctggctatggagacttcagtgagcccttggaggttacaaccaacacagtgccttcccggatcattggagatggggctaactccacagtccttctggtctctgtctcgggcagtgtggtgctggtggtaattctcattgcagcttttgtcatcagccggagacggagtaaatacagtaaagccaaacaagaagcggatgaagagaaacatttgaatcaaggtgtaagaacatatgtggacccctttacgtacgaagatcccaaccaagcagtgcgagagtttgccaaagaaattgacgcatcctgcattaagattgaaaaagttataggagttggtgaatttggtgaggtatgcagtgggcgtctcaaagtgcctggcaagagagagatctgtgtggctatcaagactctgaaagctggttatacagacaaacagaggagagacttcctgagtgaggccagcatcatgggacagtttgaccatccgaacatcattcacttggaaggcgtggtcactaaatgtaaaccagtaatgatcataacagagtacatggagaatggctccttggatgcattcctcaggaaaaatgatggcagatttacagtcattcagctggtgggcatgcttcgtggcattgggtctgggatgaagtatttatctgatatgagctatgtgcatcgtgatctggccgcacggaacatcctggtgaacagcaacttggtctgcaaagtgtctgattttggcatgtcccgagtgcttgaggatgatccggaagcagcttacaccaccaggggtggcaagattcctatccggtggactgcgccagaagcaattgcctatcgtaaattcacatcagcaagtgatgtatggagctatggaatcgttatgtgggaagtgatgtcgtacggggagaggccctattgggatatgtccaatcaagatgtgattaaagccattgaggaaggctatcggttaccccctccaatggactgccccattgcgctccaccagctgatgctagactgctggcagaaggagaggagcgacaggcctaaatttgggcagattgtcaacatgttggacaaactcatccgcaaccccaacagcttgaagaggacagggacggagagctccagacctaacactgccttgttggatccaagctcccctgaattctctgctgtggtatcagtgggcgattggctccaggccattaaaatggaccggtataaggataacttcacagctgctggttataccacactagaggctgtggtgcacgtgaaccaggaggacctggcaagaattggtatcacagccatcacgcaccagaataagattttgagcagtgtccaggcaatgcgaacccaaatgcagcagatgcacggcagaatggttcccgtctgagccagtactgaataaactcaaaactcttgaaattagtttacctcatccatgcactttaattgaagaactgcactttttttacttcgtcttcgccctctgaaattaaagaaatg

SEQ ID NO: 152 - DNA, 439 bp, human
ccgcagcatgagctccgcagccgggttctgcgcctcacgccccgggctgctgttcctggggttgctgctcctgccacttgtggtcgccttcgccagcgctgaagctgaagaagatggggacctgcagtgcctgtgtgtgaagaccacctcccaggtccgtcccaggcacatcaccagcctggaggtgatcaaggccggaccccactgccccactgcccaactgatagccacgctgaagaatggaaggaaaatttgcttggacctgcaagccccgctgtacaagaaaataattaagaaacttttggagagttagctactagctgcctacgtgtgtgcatttgctatatagcatacttcttttttccagtttcaatctaactgtgaaagaaacttctgatatttgtgttatccttatgattttaaataaacaaaataaatc

SEQ ID NO: 153 - DNA, 5183 bp, human
ggggtgagagagagagagtggccagtgctggcagaaagcacagccacctcggggctctgcatcgtggtggggccaggcgggtcggcaggtgctggcttgcgaggttgtcctgcatgcggtcactcgggtatcgaatgagtgcgaaagtggatttaatacagtcactgagaaaaactacagcttcacgagactgaccagcctggtgagataaacatttaccgtcagacactctttagctgtctgggcattgtgtgagttctttggcacatgcgcccagcctccttccccacagggtctcgcctggggcattagaagctggattgtaacatttgttttaaaagatactttgttaggctgttggttctccttacaatcccggctttccttagcatgtggttcccttcattgtatctgggtttttctatctcagtctgtcctttatacaagctttttcctctagcactaattatattccccttcccctttttccagaattccaaattctgacctgtgcatgcatgcctgtgttgagtacatgctgtttgtcggatatttggtggtggggggaggggatcacatttctgttactctcgcattgtttccttaggatgaattcttagaagtggaacttctggattcagggaatgaacacgtttgctagttactgtcaaaaatgcctcttggagaagttatgccgaaccacccaactgtcctggtcacagagcaggcttctctcggcttggggctagggttctttctggggtcgtcctttttttttttttttttgagacagagtttcgctcttgttgctgaggctggagtgcagtggcaccatctcgtctcactgcaacctctgcctcctgggttcaggtgattctcctgtcccagccttccgagtagctgggattacagggatgtagcaccatgcctggctaattttgtgtttttagtggagacggggtttctccatgttggtcaggctggtctcgaactcccagcctcaggtgatctgcccgcctcggtctcccaaagtgctgggattacaggtgtgagccactgtgcgtggcctcccagggtccttcctaatgcaggctgctttctctcatgtaaccaagagacatacattcatcccctaccacgtgccaggctgcactgcgtgcagatgcccctgcgctcacggggactggagggagccaggtgacatggagcccaggaagtggccagagctcgggaggaaggcaaagaggggaagagggcatgcagtcttaggcttggggtcccaggaggcctagggaagccttgtagatacccaggtacagcatttctgggatcaggagccatgatcccaaggcctctaatacttcagatatggcagggaggccaggtggagagacctggaggagtgaggccacagagttggggggccatggccgagacttcggcttctatccagagtcagatgggagctgttggagggttgtcagcaggtgagtgccgtgctctgacttgggtgttaataggatcatggtagctggctgcaggtgtcctgggccaaggagcagggagacaggaggcagagaagagggcgctgggttggacctgggacgcctggggtggtgagaggtggtcgatgctggtcatgctgtgaagcagtctcagtgagttccaggcgaatgagcagattcgttttagggagtgcctgtgaagagcaaacgctcttttttggtgttgctgccagatccaaggattaatgtcgtgcttgctggtggccacgttgtgccccgagatgagatccggaagctgatggaaagccaagacatcttcaccgggactcagactgagctgattgctggaggccagctcctttcctgcctctcacctcagcctgctccaggggtggacaatgtcccagaaggaagcctgccagtgcacggtgaacaggcgctgcccaaggaccagcaaatcactgccttggggagagaggaacctgtggcaatagagagccccggacaggatcttctgggagaaagcaggtctgaaccagtggatgtgaagccatttgcttcctgcgaagattctgaagctccagtcccagctgaggatgggggcagtgatgctggcatgtgtggcctgtgtcagaaggcccagctagagcggatgggagtcagtggtcccagcggttcagacctttgggctggggctgccgtggccaagccccaggccaagggtcagctggcggggggcagcctcctgatgcactgcccttgctatgggagtgaatggggcttgtggtggcgaagccaggacttggcccccagcccctctgggatggcaggcctctcgtttgggacacctactctagatgagccgtggctgggagtggaaaacgaccgagaagagctgcagacctgcttgattaaggagcagctgtcccagttgagccttgcaggagccctggatgtcccccacgccgaactcgttccgacagagtgccaggctgtcaccgctcctgtgtcgtcctgcgatctgggaggcagagacctgtgcggtggctgcacgggcagctcctcagcctgctatgccttggccacggacctccctgggggcctggaagcagtggaggcccaggaggttgatgtgaattcgttttcctggaacctcaaggaactctttttcagtgaccagacagaccaaacgtcatcaaattgttcctgtgctacgtctgaactcagagagacaccctcttccttggcagtgggctccgatccagatgtaggcagtctccaggaacaggggtcgtgtgtcctggatgacagggagctgttactactgaccggcacctgtgttgaccttggccaaggccgacggttccgggagagctgtgtgggacatgatccaacagaaccgcttgaggtttgtttggtgtcctctgagcattatgcagcaagcgacagagaaagcccaggacacgttccttccacgttggatgctggccctgaggacacgtgcccatcagcagaggagccaaggctgaacgtccaggtcacctccacgcccgtgatcgtgatgcgcggggctgctggcctgcagcgggagatccaggagggtgcctactccgggagctgctaccatcgagatggcttacggctgagtatacagtttgaggtgaggcgggtggagctccagggccccacacctctgttctgctgctggctggtgaaagacctcctccacagccaacgcgactcagccgccaggacccgcctgttccttgccagcctgcccggctccacccactctaccgctgctgagctcaccggacccagcctggtggaagtgctcagagccagaccctggtttgaggagccccccaaggctgtggaactggaggggttggcggcctgtgagggcgagtactcccaaaagtacagtaccatgagcccgctgggcagtggggccttcggcttcgtgtggactgctgtggacaaggaaaaaaacaaggaggtggtggtgaagtttattaagaaggagaaggtcttggaggattgttggattgaggatcccaaacttgggaaagttactttagagatcgcaattctatccagggtggagcacgccaatatcatcaaggtattggatatatttgaaaaccaagggttcttccagcttgtgatggagaagcacggctccggcctagacctcttcgctttcatcgaccgccaccccaggctggatgagcccctggcgagctacatcttccgacaagtgagagcagggccagagccgtgttagtgtgaacgcaggcctgggtgcctgggtccggtggctgcaaagatcagtgatccatactcggttctctctctgagctggatctagccttctgtgtggggatttcatggagtaggatatatattttgagaagaaaattctatgattgaagtagagaaagtgaggttgggaaggaaggatgaggccagatacagtcctggaatgactgagaaagtatgtttaatggttaaggtttatttacatacataaaatatccacaacaatcataaaaattaaccagtaagggttaggatgcagccagagagcgtctcaaaggcatgtgtgcggcacagcggcctgcaggttgtaagtgcccactaaatggtggctgttgaggtaattaaccagcaaaactgagatcctgacattctcacttttcagtaagtatttgtcttgatctgtttcgtgtctaattacatattgaacttcggccattattttattggaatgggagagtgatgatccaaataggaaggcaccctagcagagggacagggggaagaaacggtaactcgtgttgggttttaaggagagggtggcggttccatcctgtactgctcccagctcccccagaagaactggagaaataccagcaaagggctgtgtagacaactcacatttgctcttggattgtttgctggggacaactcgatttctaatgacagcttccgtgaatcaacatttcttccttaaagctacacactctcgggttgttgggtttccgaagtttagtttctcaggctcctacttgtaagtttcagatattatggttctgcaaaaaaagggtcacctctctccctcttcctgtgttggaaggtgacgtcctccctttagtttgtggccaacacttgtttctgaaactttttacagcaaacagagtatctgtatgaggttatgttgagggtcgcttgttaaaagctgctgcctgacagctgttaattctggggctagtgagacacataattatggtgtttatactctaaaatttttgccaaaagaatctctaccccttttgtaaatatatagacataaatgttattctatgtaaatacagatgcacaattttataaagtatatgatcgcacatcaatgtatgtaggaatcatgctggttctcagggcattgcctgtcagctccagattcatcaggacctgctcagcagcggggtcggggagctgggcctgggaacagccctggcttggttcaggccgctccagggcagcatggccagtccagggcacagaagcatctgcaggaagagcagctttcttcaagtcgctctttagccctttgtggttaatctctcagtactagttaataaatcttaatgaaactttccatgttcaaaaaaaaaa

SEQ ID NO: 154 - DNA, 591 bp, human
ccgacggcactgacggccatggcgcgttcgaacctcccgctggcgctgggcctggccctggtcgcattctgcctcctggcgctgccacgcgatgcccgggcccggccgcaggagcgcatggtcggagaactccgggacctgtcgcccgacgacccgcaggtgcagaaggcggcgcaggcggccgtggccagctacaacatgggcagcaacagcatctactacttccgagacacgcacatcatcaaggcgcagagccagctggtggccggcatcaagtacttcctgacgatggagatggggagcacagactgccgcaagaccagggtcactggagaccacgtcgacctcaccacttgccccctggcagcaggggcgcagcaggagaagctgcgctgtgactttgaggtccttgtggttccctggcagaactcctctcagctcctaaagcacaactgtgtgcagatgtgataagtccccgagggcgaaggccattgggtttggggccatggtggagggcacttcacgtccgtgggccgtatctgtcacaataaatggccagtgctgcttcttgcaaaaaaaaaaaaaaaaaaa

SEQ ID NO: 155 - DNA, 2685 bp, human
caggcgtgtcccagggggagccccgctctgcagccctgtgcgccgtagagagctggacttaggctggcagcatggccgagttcagggtcagggtgtccaccggagaagccttcggggctggcacatgggacaaagtgtctgtcagcatcgtggggacccggggagagagccccccactgcccctggacaatctcggcaaggagttcactgcgggcgctgaggaggacttccaggtgacgctcccggaggacgtaggccgagtgctgctgctgcgcgtgcacaaggcgcccccagtgctgcccctgctggggcccctggccccggatgcctggttctgccgctggttccagctgacaccgccgcggggcggccacctcctcttcccctgctaccagtggctggagggggcggggaccctggtgctgcaggagggtacagccaaggtgtcctgggcagaccaccaccctgtgctccagcaacagcgccaggaggagcttcaggcccggcaggagatgtaccagtggaaggcttacaacccaggttggcctcactgcctggatgaaaagacagtggaagacttggagctcaatatcaaatactccacagccaagaatgccaacttttatctacaagctggctctgcttttgcagagatgaaaatcaaggggttgctggaccgcaaggggctctggaggagtctgaatgagatgaaaaggatcttcaacttccggaggaccccagcagctgagcacgcatttgagcactggcaggaggatgccttcttcgcctcccagttcctgaatggtctcaaccctgtcctgatccgccgctgtcactacctcccaaagaacttccccgtcactgatgccatggtggcctcattgttgggtcctgggaccagcttgcaggctgagctagagaagggctccctgttcttggtggatcacggcatcctctctggcatccagaccaatgtcattaatgggaagccgcagttctctgcggccccaatgaccctgctataccagagcccaggctgcgggccgctgctgcctctcgccatccagctcagccagacccccggcccaaacagccccatcttcctgcccactgatgacaagtgggactggttgctggccaagacctgggtgcgcaatgccgagttctccttccatgaggccctcacgcacctgctgcactcacatctgctgcctgaggtcttcaccctggctaccctgcgtcagctgccccactgccaccctctcttcaagctgctgatcccgcacacccgatacaccctgcacatcaacacactcgcccgggagctgcttatcgtgccagggcaggtggtggacaggtccacaggcatcggcattgaaggcttctctgagttgatacagaggaacatgaagcagctgaactattctctcctgtgtctgcctgaggatatccggacccgaggagttgaagacatcccaggctactactaccgtgatgatgggatgcagatttggggtgcagtggaacgctttgtctctgaaatcatcggtatctactacccaagtgatgagtctgtccaagatgacagagagctccaggcctgggtcagagagatcttctccaagggcttcctaaaccaggagagctcaggtatcccttcctcactggagacccgggaagccctggtgcagtatgtcaccatggtgatattcacctgctcagccaagcatgcggctgtcagtgcagggcagtttgactcctgtgcttggatgcccaacctgccacccagcatgcagctgccaccacccacctccaaaggcctggcaacatgcgagggcttcatagccaccctcccacctgtcaatgccacatgtgatgtcatccttgctctctggttgctgagcaaggagcctggagaccaaaggcccctgggcacctatccggatgagcacttcacagaggaggcccctcggcggagcatcgccaccttccagagccgcctggcccagatctcgaggggcatccaggagcggaaccggggcctggtgctgccctacacctacctagaccctcccctcatcgagaacagcgtctccatctaaatcccaggggaacacaggcccagatgacatccctttgaccacatcgctctaggataactggcacccagagaaaaggactcctcagaaaaaacaggcccccatgtgcctctcctgggacaaccagactctgtaactcacccccaccaccatacacacacacaaaaacagaaacaaaatcaaaacagagaaagcagaaaatctaccaagaacagagtctcaggacagaaccactgagtcttttggaggctccaagcctcaaagtgcccgcagagcccaccttgagggttttgctagttggttttgttttgcgtttacagccgtggggggaagcacataatcccgccccagggcccactagcatccactgattggaccttatggtcacccaactcaaggacagccaccaagaagtggctgccaaagagactgggcgcagtggctcatgcccataatcccagcactttgggagatggaggcgggaaaatcatttgaggtcagaagttcaaggccagcctggacgacatagcgagactccacctctaccaaaaaataaaaattaaaaaacaaaaaaaaaaaaaaaaaa

SEQ ID NO: 156 - DNA, 4415 bp, human
gccgccgccgccgccgccgcctcctgggaaccaggggactgaagagcctgcgagagcggaacactgccggaccccgggtgggggggcgcagcagctgcgcctggccccgcccaccacacctgggcgcccgtagaaccgcgcggggcggggcggggcaggaggctggcctggcgctccggccgctttgtcgaaagccggcccgactggagcaggacgaagggggagggtctcgaggccgagtcctgttcttctgagggacggaccccagctggggtggaaaagcagtaccagagagcctccgaggcgcgcggtgccaaccatggagcgggccggccccagcttcgggcagcagcgacagcagcagcagccccagcagcagaagcagcagcagagggatcaggactcggtcgaagcatggctggacgatcactgggactttaccttctcatactttgttagaaaagccaccagagaaatggtcaatgcatggtttgctgagagagttcacaccatccctgtgtgcaaggaaggtatcagaggccacaccgaatcttgctcttgtcccttgcagcagagtcctcgtgcagataacagtgtccctggaacaccaaccaggaaaatctctgcctctgaatttgaccggcctcttagacccattgttgtcaaggattctgagggaactgtgagcttcctctctgactcagaaaagaaggaacagatgcctctaacccctccaaggtttgatcatgatgaaggggaccagtgctcaagactcttggaattagtgaaggatatttctagtcatttggatgtcacagccttatgtcacaaaattttcttgcatatccatggactgatatctgctgaccgctattccctgttccttgtctgtgaagacagctccaatgacaagtttcttatcagccgcctctttgatgttgctgaaggttcaacactggaagaagtttcaaataactgtatccgcttagaatggaacaaaggcattgtgggacatgtggcagcgcttggtgagcccttgaacatcaaagatgcatatgaggatcctcggttcaatgcagaagttgaccaaattacaggctacaagacacaaagcattctttgtatgccaattaagaatcatagggaagaggttgttggtgtagcccaggccatcaacaagaaatcaggaaacggtgggacatttactgaaaaagatgaaaaggactttgctgcttatttggcattttgtggtattgttcttcataatgctcagctctatgagacttcactgctggagaacaagagaaatcaggtgctgcttgaccttgctagtttaatttttgaagaacaacaatcattagaagtaattttgaagaaaatagctgccactattatctctttcatgcaagtgcagaaatgcaccattttcatagtggatgaagattgctccgattctttttctagtgtgtttcacatggagtgtgaggaattagaaaaatcatctgatacattaacaagggaacatgatgcaaacaaaatcaattacatgtatgctcagtatgtcaaaaatactatggaaccacttaatatcccagatgtcagtaaggataaaagatttccctggacaactgaaaatacaggaaatgtaaaccagcagtgcattagaagtttgctttgtacacctataaaaaatggaaagaagaataaagttataggggtttgccaacttgttaataagatggaggagaatactggcaaggttaagcctttcaaccgaaatgacgaacagtttctggaagcttttgtcatcttttgtggcttggggatccagaacacgcagatgtatgaagcagtggagagagccatggccaagcaaatggtcacattggaggttctgtcgtatcatgcttcagcagcagaggaagaaacaagagagctacagtcgttagcggctgctgtggtgccatctgcccagacccttaaaattactgactttagcttcagtgactttgagctgtctgatctggaaacagcactgtgtacaattcggatgtttactgacctcaaccttgtgcagaacttccagatgaaacatgaggttctttgcagatggattttaagtgttaagaagaattatcggaagaatgttgcctatcataattggagacatgcctttaatacagctcagtgcatgtttgctgctctaaaagcaggcaaaattcagaacaagctgactgacctggagatacttgcattgctgattgctgcactaagccacgatttggatcaccgtggtgtgaataactcttacatacagcgaagtgaacatccacttgcccagctttactgccattcaatcatggaacaccatcattttgaccagtgcctgatgattcttaatagtccaggcaatcagattctcagtggcctctccattgaagaatataagaccacgttgaaaataatcaagcaagctattttagctacagacctagcactgtacattaagaggcgaggagaattttttgaacttataagaaaaaatcaattcaatttggaagatcctcatcaaaaggagttgtttttggcaatgctgatgacagcttgtgatctttctgcaattacaaaaccctggcctattcaacaacggatagcagaacttgtagcaactgaattttttgatcaaggagacagagagagaaaagaactcaacatagaacccactgatctaatgaacagggagaagaaaaacaaaatcccaagtatgcaagttgggttcatagatgccatctgcttgcaactgtatgaggccctgacccacgtgtcagaggactgtttccctttgctagatggctgcagaaagaacaggcagaaatggcaggcccttgcagaacagcaggagaagatgctgattaatggggaaagcggccaggccaagcggaactgagtggcctatttcatgcagagttgaagtttacagagatggtgtgttctgcaatatgcctagtttcttacacactgtctgtatagtgtctgtatttggtatatactttgccactgctgtatttttatttttgcacaacttttgagagtatagcatgaatgtttttagaggactattacatattttttgtatatttgttttatgctactgaactgaaaggatcaacaacatccactgttagcacattgataaaagcattgtttgtgatatttcgtgtactgcaaagtgtatgcagtattcttgcactgaggtttttttgcttggggattattttaaataattggtttttgtgttttctgaattaccattttttcaagaatgtttggaatctttcctttttcaaaagtaggttaggagcaaattatcatacattctgtgacatttaaagcctttataggatagtgaaaaatgctggctgagtggattttaagagaaataattgtatttgttaacagtgtctttttttaaaaagttaaggcactctgaaacaaatggaaagtcctatgaaactgtattgtaaagaaaacattatttaattgatatgctgttttgtgagagaacaggcaagacagaactttgtcacttcagtgcagtacatttttctgaaagctacccataaaatcactttcatctcacctacctgatgcaaagcaggtgaaaccttaggagatgatccagtcactgacttgattgagggataagtgtgatttagaaatggaatggccttggatgtctatcagtgaagaaaaatgttctgttagaagatctctctaagagtttttttccttctgagcttccttttcaaaataaaagtgacaattgtagcattgacttgaagtgagacatggttatagataagagagtacaaaatgactctttttcctgtcaattgaaatttaaagaaaagttttaattatataaatagcaaagggctattgccaatactagggtcaaaaatgaatttgagggaacagtgggtaagaaactttatgcctgaataacatttagcagtattgtgattgaaaaattgccatattttgatgtataggacaagtcaactgagatccagagaatcctggatgtgaatgctaaacactggcccttaactcacattcaatgtattttcttcccataacatttagtatagttaatattttcttagaatttgagcccatttaagtggattaatattctacatgtgtgcccctaaagacacatttcttgagatgagatggaatctactcctcgtgaagaggctgtgaacattgttgaaatgacaataggatttagaatagtacacacatttagttgataaagaagtggcagggtttgagaggattgactccagcatacaagcaggcccggtaatgggcctccacgatgtccctgccataggctctgtcccgaattc

SEQ ID NO: 157 - DNA, 3048 bp, human
cgccggcggggaagatgaccgcgggcgccggcgtgctccttctgctgctctcgctctccggcgcgctccgggcccataatgaggatcttacaactagagagacctgcaaggctgggttctctgaagatgattacacggcattaatctcccaaaatattctagaaggggaaaagctacttcaagtcaagttcagcagctgtgtggggaccaaggggacacaatatgagaccaacagcatggacttcaaagttggggcagatgggacagtcttcgccacccgggagctgcaggtcccctccgagcaggtggcgttcacggtgactgcatgggacagccagacagcagagaaatgggacgccgtggtgcggttgctggtggcccagacctcgtccccgcactctggacacaagccgcagaaaggaaagaaggtcgtggctctggacccctctccgcctccgaaggacaccctgctgccgtggccccagcaccagaacgccaacgggctgaggcggcgcaaacgggactgggtcatcccacccatcaacgtgcccgagaactcgcgcgggcccttcccgcagcagctcgtgaggatccggtccgacaaagacaatgacatccccatccggtacagcatcacgggagtgggtgccgaccagccccccatggaggtcttcagcattaactccatgtccggccggatgtacgtcacaaggcccatggaccgggaggagcacgcctcttaccacctccgagcccacgctgtggacatgaatggcaacaaggtggagaaccccatcgacctgtacatctacgtcatcgacatgaatgacaaccaccctgagttcatcaaccaggtctacaactgctccgtggacgagggctccaagccaggcacctacgtgatgaccatcacggccaacgatgctgacgacagcaccacggccaacgggatggtgcggtaccggatcgtgacccagaccccacagagcccgtcccagaatatgttcaccatcaacagcgagactggagatatcgtcacagtggcggctggctgggaccgagagaaagttcagcagtacacagtcatcgttcaggccacagatatggaaggaaatctcaactatggcctctcaaacacagccacagccatcatcacggtgacagatgtgaatgacaacccgtcagaatttaccgccagcacgtttgcaggggaggtccccgaaaacagcgtggagaccgtggtcgcaaacctcacggtgatggaccgagatcagccccactctccaaactggaatgccgtttaccgcatcatcagtggggatccatccgggcacttcagcgtccgcacagaccccgtaaccaacgagggcatggtcaccgtggtgaaggcagtcgactacgagctcaacagagctttcatgctgacagtgatggtgtccaaccaggcgcccctggccagcggaatccagatgtccttccagtccacggcaggggtgaccatctccatcatggacatcaacgaggctccctacttcccctcaaaccacaagctgatccgcctggaggagggcgtgccccccggcaccgtgctgaccacgttttcagctgtggaccctgaccggttcatgcagcaggctgtgagatactcaaagctgtcagacccagcgagctggctgcacatcaatgccaccaacggccagatcaccacggtggcagtgctggaccgtgagtccctctacaccaaaaacaacgtctacgaggccaccttcctggcagctgacaatgggatacccccggccagcggcaccgggaccctccagatctatctcattgacatcaacgacaacgcccctgagctgctgcccaaggaggcgcagatctgcgagaggcccaacctgaacgccatcaacatcacggcggccgacgctgacgtgcaccccaacatcggcccctacgtcttcgagctgccctttgtcccggcggccgtgcggaagaactggaccatcacccgcctgaacggtgactatgcccaactcagcttgcgcatcctgtacctggaggccgggatgtatgacgtccccatcatcgtcacagactctggaaaccctcccctgtccaacacgtccatcatcaaagtcaaggtgtgcccatgtgatgacaacggggactgcaccaccattggcgcagtggcagcggctggtctgggcaccggtgccatcgtggccatcctcatctgcatcctcatcctgctgaccatggtcctgctgtttgtcatgtggatgaagcggcgagagaaggagcgccacacgaagcagctgctcattgaccccgaggacgacgtccgcgaaaagatcctcaagtatgacgaggaaggcggtggcgaggaggaccaggactacgacctcagccagctgcagcagccggaagccatggggcacgtgccaagcaaagcccctggcgtgcgtcgcgtggatgagcggccggtgggccctgagccccagtacccgatcaggcccatggtgccgcacccaggcgacatcggtgacttcatcaatgagggactccgcgctgctgacaacgaccccacggcacccccctatgactccctgctggtcttcgactacgaggggagcggctccaccgcaggctccgtcagctccctgaactcatccagttccggggaccaagactacgattacctcaacgactggggccccagattcaagaagctggcggacatgtatggaggtggtgaagaggattgactgacctcgcatcttcggaccgaagtgagagccgtgctcggacgccggaggagcaggactgagcagaggcggccggtcttcccgactccctgcggctgtgtccttagtgctgttaggaggccccccaatccccacgttgagctgtctagcatgagcacccacccccacagcgccctgcacccggccgctgcccagcaccgcgctggctggcactgaaggacagcaagaggcactctgtcttcacttgaatttcctagaacagaagcactgtttttaaaaaaag

SEQ ID NO: 158 - DNA, 2347 bp, human
cagatcctccccagggaatcactacaggctggttagccaaaaagtcctgattttctgctcaatagaggtccttactggaaggcagcatgtccaatgttaccttgagaaaaatgtctcccacaggaaatgagatgaagagcaccactcagggaaccacacggaagcagcaggattttcacgaggtgaacaaaagaagaactttcttacaggataacagttggataaagaaacgccctgaagaagaaaaagatgaaaattacggtagggtggtgctcaaccgacataattcccatgatgcattggacaggaaagtaaatgagagagatgtgccaaaagctacaattagtcggtacagttctgatgacactttggacaggatctcagacagaaatgatgctgctaaaacatataaggccaataccttggataaccaactaaccaataggagcatgtccatgtttagatcactggaagtaacaaagttgcaacctggcggttcattgaatgccaacacctccaacaccatagcatccacttctgctactactcctgtaaagaagaagaggcagtcctggtttccaccgccccctccaggttacaatgcctcttcgagcacaggaaccaggagacgggaaccaggtgttcaccctccaatacctccaaagcccagttctcctgtttcttctcctaaccagctgagacaggataataggcagatacatccacctaaaccaggtgtatatacagaaaccaacagatctgctgaaagaaatataagtgaagaattggataatctcatcaaaatgaacaaaagcttgaataggaatcaaggtcttgatagtctcttcagagcaaatccaaaggtagaagaaagagagaaaagagccaaaagccttgaaagtctcatctatatgagtacccggacagataaagatggcaaaggaatccaaagccttggaagtccgattaaagttaatcaaaggactgacaaaaatgagaaaggaagacaaaatctcgaatctgttgctaaagtggatgccaggacgaataaaacgagcagaagaagtgaagaccttgataatgctactgaagtaaatcccaaaggacatgaaaataccactggaaaaaaagaccttgatgggcttattaaagtggatcctgaaacaaataaaaatattacgaggggccagagccttgataatctcatcaaagtgacccctgaagtaaagagaagtaaccaaggttccaaagaccttaataacttcatcaaagtgtatccaggaacagaaaaaagtactgaagggggccaaagtctcgacagcctcattaaagtgactcctgaaagaaacagaactaaccaagggaaccaagacttggaaaatcttatcaaagtgatcccttcagcaaacaaaagcagtgaacaaggtcttgatgaacatattaatgtcagccccaaagctgtcaaaaacactgatggaaaacaagatcttgataaactcatcaaggtgaatcctgaaattttcacaaacaaccaaagaaaccaagatcttgctaacctcatcaaagtaaatcctgcagtaatcagaaacaatcagagccaagacttggacaatcttattaaagtgaaaccttcagctcttagaaacactaatcgagaccagaacctggaaaatttaattgaagtaaattctcatgtgtctgaaaacaagaatggaagctctaacactggagccaagcaggcaggaccacaggatactgttgtgtacacaaggacatatgtggagaatagtaaatcacccaaggatggatatcaggagaatatctctggaaaatacatacaaactgtttattcaacttctgataggtctgtcattgaaagagatatgtgcacttactgccgaaaacccttgggtgtagaaactaaaatgattttagatgaattacaaatttgctgccattctacttgctttaagtgtgaaatatgcaagcagcctttggaaaatctrcaagcgggtgatagtatttggatttatagacagacaatacactgtgaaccttgctactctaaaattatggcaaagtggattccataactctggcacaaggaaatcaagatgaaaagcactcattaaggaattaaagttacaagttttatcttaataatatgtaatctagaaaagctttcacattgaagatcaactcttgtacaaaattaacaattctgttattgcataagtaatctaattgtcttcaataaggtcacacacataaaaagagccatctggtctctggctagagttagcaataaaaagttcaaatggttccagaaaaaaaaaaaaaaaaaaaa

SEQ ID NO: 159 - DNA, 3482 bp, human
  misc_feature (3460)..(3460): n is a, c, g, or t
ctcgccagcggtccgcggggctggagacccacgccgtggagaggaccagcctcaggtcgccccgcctgggcccgcgccccgacctcgctgcccccgcctcgcctctctgcccgtggcgcttaccgccaccttggcctcgggggcagggcatgggcggcccccgccagatcgcccagcgccagtactaactgccctcgctctggccttcgagcccgaagcctcttctgcgcgcacaacctaggcagtaatcctaaactagcgggcaccacagaccagctgcagccaccccaacccagggatcacttccggacccctcgaccgcccggcaccagcgcgcaagggacccttcagccggagaccagagtccagtcccggtcgcgaggccaccgccgctgcccgcctcgagaagcacaacgcgggctgagccgtcggctagcgggtcactcccgagcctctgtctgcaccgcgccagccccagaccacggacgctgagcctccagcgcgcgccagcctgggccgctgggctctccgggccagcccgcgacgatcccctgagctctccgcagaagggccgagcgtccgttccggggacgccaggcccgcccccgccccccgacagccgcggggatccagagcccgggggtgcgggacgcccgcgccatgactgccgagagcgggccgccgccgccgcagccggaggtgctggctaccgtgaaggaagagcgcggcgagacggcagcaggggccggggtcccaggggaggccacgggccgcggggcgggcgggcggcgccgcaagcgccccctgcagcgcgggaagccgccctacagctacatcgcgctcatcgccatggccatcgcgcacgcgcccgagcgccgcctcacgctgggcggcatctacaagttcatcaccgagcgcttccccttctaccgcgacaaccccaaaaagtggcagaacagcatccgccacaacctcacactcaacgactgcttcctcaagatcccgcgcgaggccggccgcccgggtaagggcaactactgggcgctcgaccccaacgcggaggacatgttcgagagcggcagcttcctgcgccgccgcaagcgcttcaagcgctcggacctctccacctacccggcttacatgcacgacgcggcggctgccgcagccgccgctgccgcagccgccgccgccgccgccgccgccgccatcttcccaggcgcggtgcccgccgcgcgccccccctacccgggcgccgtctatgcaggctacgcgccgccgtcgctggccgcgccgcctccagtctactaccccgcggcgtcgcccggcccttgccgcgtcttcggcctggttcctgagcggccgctcagcccagagctggggcccgcaccgtcggggcccggcggctcttgcgcctttgcctccgccggcgcccccgctaccaccaccggctaccagcccgcaggctgcaccggggcccggccggccaacccctctgcctatgcggctgcctacgcgggccccgacggcgcgtacccgcagggcgccggcagtgcgatctttgccgctgctggccgcctggcgggacccgcttcgcccccagcgggcggcagcagtggcggcgtggagaccacggtggacttctacgggcgcacgtcgcccggccagttcggagcgctgggagcctgctacaaccctggcgggcagctcggaggggccagtgcaggcgcctaccatgctcgccatgctgccgcttatcccggtgggatagatcggttcgtgtccgccatgtgagccagcgtagggacgaaaactcatagacacatcggctgttcacacgttccccgcaacctgagaacgaacaggaatggagagaggactcaactgggacccacgtggaaaagaccgagcaggccacagaggctcggtctccccgcgcacagcgtaggcaccctgtgtactctgtaaacgggaggaggtggggcgaggcagccagagcccttggactggcacagggaccctcgatggagcgaagccctcaaacgggatgctttctggcattctatcggggagggtccttggcggtaaccagagggcagcgtagtgtcaacaccagagaccaggatccaaattgtggggaatcagtttcagccttccatgtgctgccggaactcgggcctttttacgcggttcgtcctctagtgcctttaactgcgttactacaataaaaggctgcggcagcgcctttcttcttaaagtgaggaggacaaatttgcaaaagaaataggcttttcttcttttttaaattggagaaatctctgctctggttgacctgggctggttttccctgtctctgagaacttgagacctagctccgagttgaactgtgcgtcagcactccagtcccatcacctgaaccttcagtctcccccatctgttacactagagggctgcaggactctatccaccgcccccgggttatcattcagggccccatcatcttggatgctgccctgcgtatttggcagcaatggtgggccacccagggcctctgagtagccacccaaagcctagccgctgttctagggaacggaaaagagttcatggccaagcgtctaacctaaagtcccaggattggctccaggcagcaattatatcataacttattgaacttttgagcaggacgtgctggtaatttcatggctgttactgcccagtcataaatctgcttttccattataaggcagagagaagtacattcgttcatttgtccactgtttcttgtcatcacgcagccctggacccaaagggtgaactaaagtttaaggagatgagaggattcaaggagcccgttggtgacgcctttcagtagctggggagggctcttccatccccagcaccccctgctacacctcagcagcctcccccatgcaaaaaggaaagagaaaaattaagttagggcagtcagtaaagtgagctttagaaagaaactggaattttaacttcattttgtatcttgcttaagtagcaggctcactaaaattagagaaagtccaataactctccccctttcccttgagaaatctttaagtttcgattctggagcaaaaactttcagcattaaatatttcagaggctccattcacagctttcagataaactggagtgttcagatggactgttttaataaaaatctttgagcaagtgagttatggcaagagaaactcagcctctttctgtataaacttaacagggaagggctggggtgtgaaaaagaagattgtatgaaaaccattggtaatttttattttttatttttgggactgcactatcctgttcacgaagacatgtgaacttggttcagtccaaatggggatttgtataaaccagtgctctccattagaaatatggtgcaagccacatatgtaattttaaatattctagtagccacattaataaagtnaaaagaaacaaaaaaaaaaaaa

SEQ ID NO: 160 - DNA, 3149 bp, human
ctaaagtttttttctttgaatgacagaactacagcataatgcgtggcttcaacctgctcctcttctggggatgttgtgttatgcacagctgggaagggcacataagacccacacggaaaccaaacacaaagggtaataactgtagagacagtaccttgtgcccagcttatgccacctgcaccaatacggtggacagttactattgcacttgcaaacaaggcttcctgtccagcaatgggcaaaatcacttcaaggatccaggagtgcgatgcaaagatattgatgaatgttctcaaagcccccagccctgtggtcctaactcatcctgcaaaaacctgtcagggaggtacaagtgcagctgtttagatggtttctcttctcccactggaaatgactgggtcccaggaaagccgggcaatttctcctgtactgatatcaatgagtgcctcaccagcagggtctgccctgagcattctgactgtgtcaactccatgggaagctacagttgcagctgtcaagttggattcatctctagaaactccacctgtgaagacgtgaatgaatgtgcagatccaagagcttgcccagagcatgcaacttgtaataacactgttggaaactactcttgtttctgcaacccaggatttgaatccagcagtggccacttgagttgccagggtctcaaagcatcgtgtgaagatattgatgaatgcactgaaatgtgccccatcaattcaacatgcaccaacactcctgggagctacttttgcacctgccaccctggctttgcaccaagcagtggacagttgaatttcacagaccaaggagtggaatgtagagatattgatgagtgccgccaagatccatcaacctgtggtcctaattctatctgcaccaatgccctgggctcctacagctgtggctgcattgtaggctttcatcccaatccagaaggctcccagaaagatggcaacttcagctgccaaagggttctcttcaaatgtaaggaagatgtgatacccgataataagcagatccagcaatgccaagagggaaccgcagtgaaacctgcatatgtctccttttgtgcacaaataaataacatcttcagcgttctggacaaagtgtgtgaaaataaaacgaccgtagtttctctgaagaatacaactgagagctttgtccctgtgcttaaacaaatatccatgtggactaaattcaccaaggaagagacgtcctccctggccacagtcttcctggagagtgtggaaagcatgacactggcatctttttggaaaccctcagcaaatgtcactccggctgttcgggcggaatacttagacattgagagcaaagttatcaacaaagaatgcagtgaagagaatgtgacgttggacttggtagccaagggggataagatgaagatcgggtgttccacaattgaggaatctgaatccacagagaccactggtgtggcttttgtctcctttgtgggcatggaatcggttttaaatgagcgcttcttccaagaccaccaggctcccttgaccacctctgagatcaagctgaagatgaattctcgagtcgttgggggcataatgactggagagaagaaagacggcttctcagatccaatcatctacactctggagaacgttcagccaaagcagaagtttgagaggcccatctgtgtttcctggagcactgatgtgaagggtggaagatggacatcctttggctgtgtgatcctggaagcttctgagacatataccatctgcagctgtaatcagatggcaaatcttgccgttatcatggcgtctggggagctcacgatggacttttccttgtacatcattagccatgtaggcattatcatctccttggtgtgcctcgtcttggccatcgccacctttctgctgtgtcgctccatccgaaatcacaacacctacctccacctgcacctctgcgtgtgtctcctcttggcgaagactctcttcctcgccggtatacacaagactgacaacaagacgggctgcgccatcatcgcgggcttcctgcactaccttttccttgcctgcttcttctggatgctggtggaggctgtgatactgttcttgatggtcagaaacctgaaggtggtgaattacttcagctctcgcaacatcaagatgctgcacatctgtgcctttggttatgggctgccgatgctggtggtggtgatctctgccagtgtgcagccacagggctatggaatgcataatcgctgctggctgaatacagagacagggttcatctggagtttcttggggccagtttgcacagttatagtgatcaactcccttctcctgacctggaccttgtggatcctgaggcagaggctttccagtgttaatgccgaagtctcaacgctaaaagacaccaggttactgaccttcaaggcctttgcccagctcttcatcctgggctgctcctgggtgctgggcatttttcagattggacctgtggcaggtgtcatggcttacctgttcaccatcatcaacagcctgcagggggccttcatcttcctcatccactgtctgctcaacggccaggtacgagaagaatacaagaggtggatcactgggaagacgaagcccagctcccagtcccagacctcaaggatcttgctgtcctccatgccatccgcttccaagacgggttaaagcctttcttgctttcaaatatgctatggagccacagttgaggacagtagtttcctgcaggagcctaccctgaaatctcttctcagcttaacatggaaatgaggatcccaccagccccagaaccctctggggaagaatgttgggggccgtcttcctgtggttgtatgcactgatgagaaatcagacgtttctgctccaaacgaccattttatcttcgtgctctgcaacttcttcaattccagagtttctgagaacagacccaaattcaatggcatgaccaagaacacctggctaccattttgttttctcctgcccttgttggtgcatggttctaagcgtgcccctccagcgcctatcatacgcctgacacagagaacctctcaataaatgatttgtcgcctgtctgactgatttaccctaaaaaaaaaaaaaaaaaaaaaaaaaaaaaaa

SEQ ID NO: 161 - DNA, 853 bp, human
agtggcaccgctgactgccgagaggaagctcgcctctgcccggctgccctcttgtagtccgccggcgaggggcagttctcggtgaggaggaagagagcagcggacggcacagcacccgcgcgggccctcccacaacagctccagctggcagcatcacttcccgccaatttatccaacttctgccaaggctctgaaatgccaacaacgtcgaggcctgcacttgatgtcaagggtggcacctcacctgcgaaggaggatgccaaccaagagatgagctccgtggcctactccaaccttgcggtgaaagatcgcaaagcagtggccattctgcactaccctggggtagcctcaaatggaaccaaggccagtggggctcccactagttcctcgggatctccaataggctctcctacaaccacccctcccactaaacccccatccttcaacctgcaccccgcccctcacttgctggctagtatgcagctgcagaaacttaatagccagtatcaggggatggctgctgccactccaggccaacccggggaggcaggacccctgcaaaactgggactttggggcccaggcgggaggggcagaatcactctctccttctgctggtgcccagagccctgctatcatcgattcggacccagtggatgaggaagtgctgatgtcgctggtggtggaactggggttggaccgagccaatgagcttccggagctgtggctggggcagaatgagtttgacttcactgcggactttccatctagctgctaatgccaagtgtccctaaagatggaggaataaagccaccaattctgttgtaaataaaaataaagttacttacaaagag

SEQ ID NO: 162 - DNA, 3661 bp, human
cgcggagagatgccgcgggggccgctcgcagccgccgctgacttgtgaatgggaccgggactggggccgggactgacaccgcagcgcttgccctgcgccagggactggcggctcggaggttgcgtccaccctcaagggccccagaaatcactgtgttttcagctcagcggccctgtgacattccttcgtgttgtcatttgttgagtgaccaatcagatgggtggagtgtgttacagaaattggcagcaagtatccaatgggtgaagaagaagctaactggggacgtgggcagccctgacgtgatgagctcaaccagcagagacattccatcccaagagaggtctgcgtgacgcgtccgggaggccaccctcagcaagaccaccgtacagttggtggaaggggtgacagctgcattctcctgtgcctaccacgtaaccaaaaatgaaggagaactactgtttacaagccgccctggtgtgcctgggcatgctgtgccacagccatgcctttgccccagagcggcgggggcacctgcggccctccttccatgggcaccatgagaagggcaaggaggggcaggtgctacagcgctccaagcgtggctgggtctggaaccagttcttcgtgatagaggagtacaccgggcctgaccccgtgcttgtgggcaggcttcattcagatattgactctggtgatgggaacattaaatacattctctcaggggaaggagctggaaccatttttgtgattgatgacaaatcagggaacattcatgccaccaagacgttggatcgagaagagagagcccagtacacgttgatggctcaggcggtggacagggacaccaatcggccactggagccaccgtcggaattcattgtcaaggtccaggacattaatgacaaccctccggagttcctgcacgagacctatcatgccaacgtgcctgagaggtccaatgtgggaacgtcagtaatccaggtgacagcttcagatgcagatgaccccacttatggaaatagcgccaagttagtgtacagtatcctcgaaggacaaccctatttttcggtggaagcacagacaggtatcatcagaacagccctacccaacatggacagggaggccaaggaggagtaccacgtggtgatccaggccaaggacatgggtggacatatgggcggactctcagggacaaccaaagtgacgatcacactgaccgatgtcaatgacaacccaccaaagtttccgcagagcgtataccagatatctgtgtcagaagcagccgtccctggggaggaagtaggaagagtgaaagctaaagatccagacattggagaaaatggcttagtcacatacaatattgttgatggagatggtatggaatcgtttgaaatcacaacggactatgaaacacaggagggggtgataaagctgaaaaagcctgtagattttgaaaccaaaagagcctatagcttgaaggtagaggcagccaacgtgcacatcgacccgaagtttatcagcaatggccctttcaaggacactgtgaccgtcaagatcgcagtagaagatgctgatgagccccctatgttcttggccccaagttacatccacgaagtccaagaaaatgcagctgctggcaccgtggttgggagagtgcatgccaaagaccctgatgctgccaacagcccgataaggtattccatcgatcgtcacactgacctcgacagatttttcactattaatccagaggatggttttattaaaactacaaaacctctggatagagaggaaacagcctggctcaacatcactgtctttgcagcagaaatccacaatcggcatcaggaagccaaagtcccagtggccattagggtccttgatgtcaacgataatgctcccaagtttgctgccccttatgaaggtttcatctgtgagagtgatcagaccaagccactttccaaccagccaattgttacaattagtgcagatgacaaggatgacacggccaatggaccaagatttatcttcagcctaccccctgaaatcattcacaatccaaatttcacagtcagagacaaccgagataacacagcaggcgtgtacgcccggcgtggagggttcagtcggcagaagcaggacttgtaccttctgcccatagtgatcagcgatggcggcatcccgcccatgagtagcaccaacaccctcaccatcaaagtctgcgggtgcgacgtgaacggggcactgctctcctgcaacgcagaggcctacattctgaacgccggcctgagcacaggcgccctgatcgccatcctcgcctgcatcgtcattctcctggtcattgtagtattgtttgtgaccctgagaaggcaaaagaaagaaccactcattgtctttgaggaagaagatgtccgtgagaacatcattacttatgatgatgaagggggtggggaagaagacacagaagcctttgatattgccaccctccagaatcctgatggtatcaatggatttatcccccgcaaagacatcaaacctgagtatcagtacatgcctagacctgggctccggccagcgcccaacagcgtggatgtcgatgacttcatcaacacgagaatacaggaggcagacaatgaccccacggctcctccttatgactccattcaaatctacggttatgaaggcaggggctcagtggccgggtccctgagctccctagagtcggccaccacagattcagacttggactatgattatctacagaactggggacctcgttttaagaaactagcagatttgtatggttccaaagacacttttgatgacgattcttaacaataacgatacaaatttggccttaagaactgtgtctggcgttctcaagaatctagaagatgtgtaaacaggtatttttttaaatcaaggaaaggctcatttaaaacaggcaaagttttacagagaggatacatttaataaaactgcgaggacatcaaagtggtaaatactgtgaaataccttttctcacaaaaaggcaaatattgaagttgtttatcaacttcgctagaaaaaaaaaacacttggcatacaaaatatttaagtgaaggagaagtctaacgctgaactgacaatgaagggaaattgtttatgtgttatgaacatccaagtctttcttcttttttaagttgtcaaagaagcttccacaaaattagaaaggacaacagttctgagctgtaatttcgccttaaactctggacactctatatgtagtgcatttttaaacttgaaatatataatattcagccagcttaaacccatacaatgtatgtacaatacaatgtacaattatgtctcttgagcatcaatcttgttactgctgattcttgtaaatctttttgcttctactttcatcttaaactaatacgtgccagatataactgtcttgtttcagtgagagacgccctatttctatgtcatttttaatgtatctatttgtacaattttaaagttcttattttagtatacatataaatatcagtattctgacatgtaagaaaatgttacggcatcacacttatattttatgaacattgtactgttgctttaatatgagcttcaatataagaagcaatctttgaaataaaaaaagatttttttttaaaaaaaa

SEQ ID NO: 163 - DNA, 1589 bp, human
ggcacagatcttggaacgagacgacctgctgtcagcacgatggaccccaaacagaccaccctcctgtgtcttgtgctctgtctgggccagaggattcaggcacaggaaggggactttcccatgcctttcatatctgccaaatcgagtcctgtgattcccttggatggatctgtgaaaatccagtgccaggccattcgtgaagcttacctgacccagctgatgatcataaaaaactccacgtaccgagagataggcagaagactgaagttttggaatgagactgatcctgagttcgtcattgaccacatggacgcaaacaaggcagggcgctatcagtgccaatataggatagggcactacagattccggtacagtgacaccctggagctggtagtgacaggcttgtatggcaaacccttcctctctgcagatcggggtctggtgttgatgccaggagagaatatttccctcacgtgcagctcagcacacatcccatttgatagattttcactggccaaggagggagaactttctctgccacagcaccaaagtggggaacacccggccaacttctctttgggtcctgtggacctcaatgtctcagggatctacaggtgctacggttggtacaacaggagcccctacctgtggtccttccccagtaatgccttggagcttgtggtcacagactccatccaccaagattacacgacgcagaacttgatccgcatggccgtggcaggactggtcctcgtggctctcttggccatactggttgaaaattggcacagccatacggcactgaacaaggaagcctcggcagatgtggctgaaccgagctggagccaacagatgtgtcagccaggattgacctttgcacgaacaccaagtgtctgcaagtaaacacctggaggtgaaggcagagaggagccaggactgtggagtccgacaaagctacttgaaggacacaagagagaaaagctcactaagaagcttgaatctacttttttttttttttgagacagagtctggctctgtcacccaggctgaagtgcagtggagcaatctcggctcattgaacctcttgggttcaagtgattcttgtgcctcagcctcccaagtagctggaattacaggcacataccactgcacccagctaatttttgtatttttagtagagatggggtttcactgtgttggccaggctggtctcgaactcctggacctcaggtgatccacccaccttggcctcccaaagtgctgagattataggcatgagccaccacgcctggccagatgcatgttcaaaccaatcaaatggtgttttcttatgcaggactgatcgatttgcacccacctttctgcacataagttatggttttccatcttatctgtcttctgattttttatatcctgtttaatttcttccttcattgttcttctctttttttatttattttatttatttttatttttatttttatttgagacagagtctcactctgttgcccaggaggcggaggttgcagtgaaccaagagatggcgccagtgcactccaccctgggtgacagagagactctttcttttt

SEQ ID NO: 164 - DNA, 4381 bp, human
gccttcaactaccatcccaccacctgctgaggagaaaaattcttcaagactcagagcacacagccagcaccagaggccccatgaccctggacagaccaggggagggggccaccatgctgaagacattcactgttttgctcttttgcattcggatgagtctgggtatgacatcgatagtgatggaccctcaaccggagttgtggatagagtccaactacccccaggccccttgggagaacatcacgctttggtgccgaagcccctctcggatatcaagcaagttcctgctgctgaaggataagacacaaatgacctggatccgcccttcccacaagaccttccaagtttcattccttataggtgcccttactgagtccaatgcaggtctttaccggtgctgctactggaaggagacaggctggtcaaagcccagtaaagttctagagttggaggcaccaggccaactgcccaagcccatcttctggattcaggctgagacccccgctcttcctgggtgtaatgttaacatcctctgccatggctggctgcaggatttggtattcatgctgtttaaagagggatatgcagagcctgtggattaccaagtcccaactgggacaatggccatattctccattgacaacctgacacctgaggatgaaggggtttacatctgccgcactcatatccagatgctccccaccctgtggtcagagcccagcaaccccctgaagctggttgtagcaggactctaccccaaaccaactttgacagcccatcctgggcccatcatggcacctggagaaagcctgaatctcaggtgccaagggccaatctatggaatgacctttgctctaatgagggttgaagacttggagaagtccttttaccacaagaagacaataaaaaatgaggcaaatttcttcttccagtctttgaagatccaagatactggacattacctctgtttttactatgacgcatcatatagaggttcactccttagtgatgtcctgaaaatctgggtaactgacactttccccaagacctggctacttgctcggcccagtgctgtggtccaaatgggtcagaatgtgagcctacggtgtcgaggaccagtggatggagtgggtcttgcactctataagaaaggagaagacaaaccacttcaatttttggatgccaccagcatcgatgacaacacatcattcttcctcaacaatgtaacctacagtgatactggcatctatagctgccactatcttctcacctggaagacctccattaggatgccatcacacaacactgtggagcttatggttgtagataagccccccaaaccctccctgtcagcttggccaagcactgtgttcaagctaggaaaggccatcacccttcagtgccgagtatctcatccagtactggaattttctctggaatgggaagaaagagaaacattccaaagattctcagtaaacggagacttcatcatcagtaatgttgacgggaaaggcacagggacctacagttgcagctatcgcgtagagacacatcctaacatgtggtcacatcgcagtgagcccctgaagctgatggggccagcaggctatctcacctggaattacgttctgaatgaagctatcaggttgtctctaatcatgcagcttgttgccttgctgttggtagtgctgtggataaggtggaagtgtcggagactcagaatcagagaagcctggttgctgggaacagctcaaggggtcaccatgctcttcatagtcacggcccttctctgctgtggactgtgcaatggggtattgatagaagagactgaaatagtcatgccaacccctaagcctgagctgtgggcagagaccaactttcctctggccccgtggaagaacttaaccctctggtgcagaagcccttctggctcaactaaggagtttgtgttgctgaaggatgggaccgggtggatcgccactcgcccggcctcagagcaggtccgggctgccttcccccttggcgccctgacccagagccacaccgggagctaccactgccattcatgggaggagatggctgtatcggagcccagtgaggcacttgagctggtggggacagacatcctccccaaacctgtcatttctgcttcccccacaatccggggccaggaactacaactccggtgcaaaggatggctggcaggcatggggtttgctctgtataaggagggagagcaagaacctgtccagcaacttggtgctgttggaagagaagccttctttacaatccagagaatggaggataaagacgaaggcaattacagctgccgcactcacactgaaaaactccccttcaagtggtctgagcccagtgagccgctggagcttgtcataaaagaaatgtaccctaagcccttcttcaagacatgggccagccctgtggtcacccctggtgcccgagtgactttcaattgctccaccccccaccagcatatgagctttattctttacaaagatggaagtgaaatagcatccagtgacaggtcctgggcaagtccgggggccagtgcagctcactttctaatcatttcggtgggcattggtgatggagggaattacagctgccgatattatgacttttctatctggtctgagcccagcgaccctgtggagctcgtggtgacagaattctaccccaaacccactctcctggcacagccaggtcctgtggtgtttcctgggaagagtgtgatcctgcgctgccaagggactttccagggcatgaggttcgccctcttgcaggagggagcccatgttcccttacagtttcggagtgtctcagggaactcagctgacttccttctccacactgttggagcagaggactctgggaactatagctgtatctactatgagacaaccatgtcaaacagggggtcatatctcagtatgccccttatgatctgggtgactgacacattccctaagccatggttgtttgctgagcccagttctgtggttcccatggggcagaatgttactctctggtgccgagggccggtccatggagtaggatacattctgcacaaagaaggagaagccacttcaatgcagctctggggatccaccagtaatgacggggcattccccatcaccaatatatctggtactagcatggggcgttacagctgctgctaccaccctgactggaccagttctatcaagatacaacctagcaacaccctggaactcctagtcacaggcttactccccaaacccagcctattagcccagcctggtcccatggtggcccctggcgaaaatatgactcttcagtgtcaaggggaactgccagactcaacatttgtgctgttgaaggagggggctcaggagcctttagagcaacagaggccaagtgggtacagggctgacttctggatgccagcagtgagaggtgaagactctgggatctatagctgtgtttattatttggactctactccctttgcagcttcaaatcacagtgactccctggagatctgggtgactgataagccccctaaaccctctctgtcagcctggcccagcaccatgttcaagttagggaaggacatcacccttcagtgccgaggacccctgccaggtgttgaatttgttctagaacatgatggagaagaagcacctcagcagttttcagaggatggagactttgtcatcaacaacgtagaaggaaaaggcattggaaactacagctgcagctaccgcctccaggcctaccctgatatctggtcagagcctagtgatcccctggagctggtgggggcagcagggcctgttgctcaggagtgcactgtagggaacattgtccgaagtagcctaatcgtggtggttgttgtagccttgggggtagtgctagccatagagtggaagaagtggcctcgactgcgaaccagaggctcagagacagacggaagagaccagaccattgcccttgaagagtgtaaccaagaaggagaaccaggcacccctgccaattctccttcatcaacctctcagagaatctctgtggaactgcccgttccaatataataatctcctcctttacaagagctttcctctcctctctcttgctctcagagacctataaatccaaccagttaccctgcaagtcagccccatctgctgttccttggtctctaatcacctgagctgggtaaaggggattctgggagttgagagctctgccagggtgagatgtttcctgaagagaggttccccacccctgtaactcctcactgtactgatttactggcgcatgaaattctattaaaaatgcattcttctgaataaaaagagtattcactatttaacttcaattt

SEQ ID NO: 165 - DNA, 510 bp, human
gtgccttctctacttcgctcttggaacataatttctcatggcagcttttactaaactgagtattgagccagcatttactccaggacccaacatagaactccagaaagactctgactgctgttcttgccaagaaaaatgggttgggtaccggtgcaactgttacttcatttccagtgaacagaaaacttggaacgaaagtcggcatctctgtgcttctcagaaatccagcctgcttcagcttcaaaacacagatgaactggattttatgagctccagtcaacaattttactggattggactctcttacagtgaggagcacaccgcctggttgtgggagaatggctctgcactctcccagtatctatttccatcatttgaaacttttaatacaaagaactgcatagcgtataatccaaatggaaatgctttagatgaatcctgtgaagataaaaatcgttatatctgtaagcaacagctcatttaaatgtttcttggggcagagaaggtgga

SEQ ID NO: 166 - DNA, 982 bp, human
agacaattttcagcaggaagaagtagaaaggataaaatggatcctgcaccacgggaacctcacagcacctcacttcttttggttttctttctctttggggcacctctggactcactccccagcatgaaggcgctgagcccggtgcgcggctgctacgaggcggtgtgctgcctgtcggaacgcagtctggccatcgcccggggccgagggaagggcccggcagctgaggagccgctgagcttgctggacgacatgaaccactgctactcccgcctgcgggaactggtacccggagtcccgagaggcactcagcttagccaggtggaaatcctacagcgcgtcatcgactacattctcgacctgcaggtagtcctggccgagccagcccctggaccccctgatggcccccaccttcccatccagacagccgagctcgctccggaacttgtcatctccaacgacaaaaggagcttttgccactgactcggccgtgtcctgacacctccagaacgcaggtgctggcgcccgttctgcctgggaccccgggaacctctcctgccggaagccggacggcagggatgggccccaacttcgccctgcccacttgacttcaccaaatcccttcctggagactgaacctggtgctcaggagcgaaggactgtgaacttgtggcctgaagagccagagctagctctggccaccagctgggcgacgtcaccctgctcccaccccaccccaagttctaaggtcttttcagagcgtggaggtgtggaaggagtggctgctctccaaactatgccaaggcggcggcagagctggtcttctggtctccttggagaaaggttctgttgccctgatttatgaactctataatagagtatataggttttgtaccttttttacaggaaggtgactttctgtaacaatgcgatgtatattaaactttttataaaagttaacattttgcataataaacgattt

SEQ ID NO: 167 - DNA, 1220 bp, human
ttcagaaggaggagagacaccgggcccagggcaccctcgcgggcgggcggacccaagcagtgagggcctgcagccggccggccagggcagcggcaggcgcggcccggacctacgggaggaagccccgagccctcggcgggctgcgagcgactccccggcgatgcctcacaactccatcagatctggccatggagggctgaaccagctgggaggggcctttgtgaatggcagacctctgccggaagtggtccgccagcgcatcgtagacctggcccaccagggtgtaaggccctgcgacatctctcgccagctccgcgtcagccatggctgcgtcagcaagatccttggcaggtactacgagactggcagcatccggcctggagtgatagggggctccaagcccaaggtggccacccccaaggtggtggagaagattggggactacaaacgccagaaccctaccatgtttgcctgggagatccgagaccggctcctggctgagggcgtctgtgacaatgacactgtgcccagtgtcagctccattaatagaatcatccggaccaaagtgcagcaaccattcaacctccctatggacagctgcgtggccaccaagtccctgagtcccggacacacgctgatccccagctcagctgtaactcccccggagtcaccccagtcggattccctgggctccacctactccatcaatgggctcctgggcatcgctcagcctggcagcgacaagaggaaaatggatgacagtgatcaggatagctgccgactaagcattgactcacagagcagcagcagcggaccccgaaagcaccttcgcacggatgccttcagccagcaccacctcgagccgctcgagtgcccatttgagcggcagcactacccagaggcctatgcctcccccagccacaccaaaggcgagcagggcgagagatggtggggcccacgctgcccggatacccaccccacatccccaccagcggacagggcagctatgcctcctctgccatcgcaggcatggtggcaggaagtgaatactctggcaatgcctatggccacaccccctactcctcctacagcgaggcctggggcttccccaactccagcttgctgagttccccatattattacagttccacatcaaggccgagtgcaccgcccaccactgccacggcctttgaccatctgtagttgccatggggacagtg

SEQ ID NO: 168 - DNA, 2008 bp, human
gaattctgatgtgcttcagtgcacagaacagtaacagatgagctgcttttggggagagcttgagtactcagtcggagcatcatcatggggtctagtgccacagagattgaagaattggaaaacaccacttttaagtatcttacaggagaacagactgaaaaaatgtggcagcgcctgaaaggaatactaagatgcttggtgaagcagctggaaagaggtgatgttaacgtcgtcgacttaaagaagaatattgaatatgcggcatctgtgctggaagcagtttatatcgatgaaacaagaagacttctggatactgaagatgagctcagtgacattcagactgactcagtcccatctgaagtccgggactggttggcttctacctttacacggaaaatggggatgacaaaaaagaaacctgaggaaaaaccaaaatttcggagcattgtgcatgctgttcaagctggaatttttgtggaaagaatgtaccgaaaaacatatcatatggttggtttggcatatccagcagctgtcatcgtaacattaaaggatgttgataaatggtctttcgatgtatttgccctaaatgaagcaagtggagagcatagtctgaagtttatgatttatgaactgtttaccagatatgatcttatcaaccgtttcaagattcctgtttcttgcctaatcacctttgcagaagctttagaagttggttacagcaagtacaaaaatccatatcacaatttgattcatgcagctgatgtcactcaaactgtgcattacataatgcttcatacaggtatcatgcactggctcactgaactggaaattttagcaatggtctttgctgctgccattcatgattatgagcatacagggacaacaaacaactttcacattcagacaaggtcagatgttgccattttgtataatgatcgctctgtccttgagaatcaccacgtgagtgcagcttatcgacttatgcaagaagaagaaatgaatatcttgataaatttatccaaagatgactggagggatcttcggaacctagtgattgaaatggttttatctacagacatgtcaggtcacttccagcaaattaaaaatataagaaacagtttgcagcagcctgaagggattgacagagccaaaaccatgtccctgattctccacgcagcagacatcagccacccagccaaatcctggaagctgcattatcggtggaccatggccctaatggaggagtttttcctgcagggagataaagaagctgaattagggcttccattttccccactttgtgatcggaagtcaaccatggtggcccagtcacaaataggtttcatcgatttcatagtagagccaacattttctcttctgacagactcaacagagaaaattgttattcctcttatagaggaagcctcaaaagccgaaacttcttcctatgtggcaagcagctcaaccaccattgtggggttacacattgctgatgcactaagacgatcaaatacaaaaggctccatgagtgatgggtcctattccccagactactcccttgcagcagtggacctgaagagtttcaagaacaacctggtggacatcattcagcagaacaaagagaggtggaaagagttagctgcacaagaagcaagaaccagttcacagaagtgtgagtttattcatcagtaaacacctttaagtaaaacctcgtgcatggtggcagctctaatttgaccaaaagacttggagattttgattatgcttgctggaaatctaccctgtcctgtgtgagacaggaaatctatttttgcagattgctcaataagcatcatgagccacataaataacagctgtaaactccttaattcaccgggctcaactgctaccgaacagattcatctagtggctacatcagcaccttgtgctttcagatatctgtttcaatggcattttgtggcatttgtctttaccgagtgccaataaattttctttgagcaaaaaaaaa

SEQ ID NO: 169 - DNA, 5235 bp, human
atgaggctgctctgggggctgatctgggcatccagcttcttcaccttatctctgcagaagcccaggttgctcttgttctctccttctgtggttcatctgggggtccccctatcggtgggggtgcagctccaggatgtgccccgaggacaggtagtgaaaggatcagtgttcctgagaaacccatctcgtaataatgtcccctgctccccaaaggtggacttcacccttagctcagaaagagacttcgcactcctcagtctccaggtgcccttgaaagatgcgaagagctgtggcctccatcaactcctcagaggccctgaggtccagctggtggcccattcgccatggctaaaggactctctgtccagaacgacaaacatccagggtatcaacctgctcttctcctctcgccgggggcacctctttttgcagacggaccagcccatttacaaccctggccagcgggttcggtaccgggtctttgctctggatcagaagatgcgcccgagcactgacaccatcacagtcatggtggagaactctcacggcctccgcgtgcggaagaaggaggtgtacatgccctcgtccatcttccaggatgactttgtgatcccagacatctcagagccagggacctggaagatctcagcccgattctcagatggcctggaatccaacagcagcacccagtttgaggtgaagaaatatgtccttcccaactttgaggtgaagatcacccctggaaagccctacatcctgacggtgccaggccatcttgatgaaatgcagttagacatccaggccaggtacatctatgggaagccagtgcagggggtggcatatgtgcgctttgggctcctagatgaggatggtaagaagactttctttcgggggctggagagtcagaccaagctggtgaatggacagagccacatttccctctcaaaggcagagttccaggacgccctggagaagctgaatatgggcattactgacctccaggggctgcgcctctacgttgctgcagccatcattgagtatccaggtggggagatggaggaggcagagctcacatcctggtattttgtgtcatctcccttctccttggatcttagcaagaccaagcgacaccttgtgcctggggcccccttcctgctgcaggccttggtccgtgagatgtcaggctccccagcttctggcattcctgtcaaagtttctgccacggtgtcttctcctgggtctgttcctgaagtccaggacattcagcaaaacacagacgggagcggccaagtcagcattccaataattatccctcagaccatctcagagctgcagctctcagtatctgcaggctccccacatccagcgatagccaggctcactgtggcagccccaccttcaggaggccccgggtttctgtctattgagcggccggattctcgacctcctcgtgttggggacactctgaacctgaacttgcgagccgtgggcagtggggccaccttttctcattactactacatgatcctatcccgagggcagatcgtgttcatgaatcgagagcccaagaggaccctgacctcggtctcggtgtttgtggaccatcacctggcaccctccttctactttgtggccttctactaccatggagaccacccagtggccaactccctgcgagtggatgtccaggctggggcctgcgagggcaagctggagctcagcgtggacggtgccaagcagtaccggaacggggagtccgtgaagctccacttagaaaccgactccctagccctggtggcgctgggagccttggacacagctctgtatgctgcaggcagcaagtcccacaagcccctcaacatgggcaaggtctttgaagctatgaacagctatgacctcggctgtggtcctgggggtggggacagtgcccttcaggtgttccaggcagcgggcctggccttttctgatggagaccagtggaccttatccagaaagagactaagctgtcccaaggagaagacaacccggaaaaagagaaacgtgaacttccaaaaggcgattaatgagaaattgggtcagtatgcttccccgacagccaagcgctgctgccaggatggggtgacacgtctgcccatgatgcgttcctgcgagcagcgggcagcccgcgtgcagcagccggactgccgggagcccttcctgtcctgctgccaatttgctgagagtctgcgcaagaagagcagggacaagggccaggcgggcctccaacgagccctggagatcctgcaggaggaggacctgattgatgaggatgacattcccgtgcgcagcttcttcccagagaactggctctggagagtggaaacagtggaccgctttcaaatattgacactgtggctccccgactctctgaccacgtgggagatccatggcctgagcctgtccaaaaccaaaggcctatgtgtggccaccccagtccagctccgggtgttccgcgagttccacctgcacctccgcctgcccatgtctgtccgccgctttgagcagctggagctgcggcctgtcctctataactacctggataaaaacctgactgtgagcgtccacgtgtccccagtggaggggctgtgcctggctgggggcggagggctggcccagcaggtgctggtgcctgcgggctctgcccggcctgttgccttctctgtggtgcccacggcagccgccgctgtgtctctgaaggtggtggctcgagggtccttcgaattccctgtgggagatgcggtgtccaaggttctgcagattgagaaggaaggggccatccatagagaggagctggtctatgaactcaaccccttggaccaccgaggccggaccttggaaatacctggcaactctgatcccaatatgatccctgatggggactttaacagctacgtcagggttacagcctcagatccattggacactttaggctctgagggggccttgtcaccaggaggcgtggcctccctcttgaggcttcctcgaggctgtggggagcaaaccatgatctacttggctccgacactggctgcttcccgctacctggacaagacagagcagtggagcacactgcctcccgagaccaaggaccacgccgtggatctgatccagaaaggctacatgcggatccagcagtttcggaaggcggatggttcctatgcggcttggttgtcacggggcagcagcacctggctcacagcctttgtgttgaaggtcctgagtttggcccaggagcaggtaggaggatcgcctgagaaactgcaggagacatctaactggcttctgtcccagcagcaggctgacggctcgttccaggacctctctccagtgatacataggagcatgcaggggggtttggtgggcaatgatgagactgtggcactcacagcctttgtgaccatcgcccttcatcatgggctggccgtcttccaggatgagggtgcagagccattgaagcagagagtggaagcctccatctcaaaggcaagctcatttttgggggagaaagcaagtgctgggctcctgggtgcccacgcagctgccatcacggcctatgccctgacactgaccaaggcccctgcggacctgcggggtgttgcccacaacaacctcatggcaatggcccaggagactggagataacctgtactggggctcagtcactggttctcagagcaatgccgtgtcgcccaccccggctcctcgcaacccatccgaccccatgccccaggccccagccctgtggattgaaaccacagcctacgccctgctgcacctcctgcttcacgagggcaaagcagagatggcagaccaggctgcggcctggctcacccgtcagggcagcttccaagggggattccgcagtacccaagacacggtgattgccctggatgccctgtctgcctactggattgcctcccacaccactgaggagaggggtctcaatgtgactctcagctccacaggccggaatgggttcaagtcccacgcgctgcagctgaacaaccgccagattcgcggcctggaggaggagctgcagttttccttgggcagcaagatcaatgtgaaggtgggaggaaacagcaaaggaaccctgaaggtccttcgtacctacaatgtcctggacatgaagaacacgacctgccaggacctacagatagaagtgacagtcaaaggccacgtcgagtacacgatggaagcaaacgaggactatgaggactatgagtacgatgagcttccagccaaggatgacccagatgcccctctgcagcccgtgacacccctgcagctgtttgagggtcggaggaaccgccgcaggagggaggcgcccaaggtggtggaggagcaggagtccagggtgcactacaccgtgtgcatctggcggaacggcaaggtggggctgtctggcatggccatcgcggacgtcaccctcctgagtggattccacgccctgcgtgctgacctggagaagctgacctccctctctgaccgttacgtgagtcactttgagaccgaggggccccacgtcctgctgtattttgactcggtccccacctcccgggagtgcgtgggctttgaggctgtgcaggaagtgccggtggggctggtgcagccggccagcgcaaccctgtacgactactacaaccccgagcgcagatgttctgtgttttacggggcaccaagtaagagcagactcttggccaccttgtgttctgctgaagtctgccagtgtgctgaggggaagtgccctcgccagcgtcgcgccctggagcggggtctgcaggacgaggatggctacaggatgaagtttgcctgctactacccccgtgtggagtacggcttccaggttaaggttctccgagaagacagcagagctgctttccgcctctttgagaccaagatcacccaagtcctgcacttcaccaaggatgtcaaggccgctgctaatcagatgcgcaacttcctggttcgagcctcctgccgccttcgcttggaacctgggaaagaatatttgatcatgggtctggatggggccacctatgacctcgagggacacccccagtacctgctggactcgaatagctggatcgaggagatgccctctgaacgcctgtgccggagcacccgccagcgggcagcctgtgcccagctcaacgacttcctccaggagtatggcactcaggggtgccaggtgtga

SEQ ID NO: 170 - DNA, 4221 bp, human
gtagcagcgagcagcagagtccgcacgctccggcgaggggcagaagagcgcgagggagcgcggggcagcagaagcgagagccgagcgcggacccagccaggacccacagccctccccagctgcccaggaagagccccagccatggaacaccagctcctgtgctgcgaagtggaaaccatccgccgcgcgtaccccgatgccaacctcctcaacgaccgggtgctgcgggccatgctgaaggcggaggagacctgcgcgccctcggtgtcctacttcaaatgtgtgcagaaggaggtcctgccgtccatgcggaagatcgtcgccacctggatgctggaggtctgcgaggaacagaagtgcgaggaggaggtcttcccgctggccatgaactacctggaccgcttcctgtcgctggagcccgtgaaaaagagccgcctgcagctgctgggggccacttgcatgttcgtggcctctaagatgaaggagaccatccccctgacggccgagaagctgtgcatctacaccgacaactccatccggcccgaggagctgctgcaaatggagctgctcctggtgaacaagctcaagtggaacctggccgcaatgaccccgcacgatttcattgaacacttcctctccaaaatgccagaggcggaggagaacaaacagatcatccgcaaacacgcgcagaccttcgttgccctctgtgccacagatgtgaagttcatttccaatccgccctccatggtggcagcggggagcgtggtggccgcagtgcaaggcctgaacctgaggagccccaacaacttcctgtcctactaccgcctcacacgcttcctctccagagtgatcaagtgtgacccggactgcctccgggcctgccaggagcagatcgaagccctgctggagtcaagcctgcgccaggcccagcagaacatggaccccaaggccgccgaggaggaggaagaggaggaggaggaggtggacctggcttgcacacccaccgacgtgcgggacgtggacatctgagggcgccaggcaggcgggcgccaccgccacccgcagcgagggcggagccggccccaggtgctccactgacagtccctcctctccggagcattttgataccagaagggaaagcttcattctccttgttgttggttgttttttcctttgctctttcccccttccatctctgacttaagcaaaagaaaaagattacccaaaaactgtctttaaaagagagagagagaaaaaaaaaatagtatttgcataaccctgagcggtgggggaggagggttgtgctacagatgatagaggattttataccccaataatcaactcgtttttatattaatgtacttgtttctctgttgtaagaataggcattaacacaaaggaggcgtctcgggagaggattaggttccatcctttacgtgtttaaaaaaaagcataaaaacattttaaaaacatagaaaaattcagcaaaccatttttaaagtagaagagggttttaggtagaaaaacatattcttgtgcttttcctgataaagcacagctgtagtggggttctaggcatctctgtactttgcttgctcatatgcatgtagtcactttataagtcattgtatgttattatattccgtaggtagatgtgtaacctcttcaccttattcatggctgaagtcacctcttggttacagtagcgtagcgtggccgtgtgcatgtcctttgcgcctgtgaccaccaccccaacaaaccatccagtgacaaaccatccagtggaggtttgtcgggcaccagccagcgtagcagggtcgggaaaggccacctgtcccactcctacgatacgctactataaagagaagacgaaatagtgacataatatattctatttttatactcttcctatttttgtagtgacctgtttatgagatgctggttttctacccaacggccctgcagccagctcacgtccaggttcaacccacagctacttggtttgtgttcttcttcatattctaaaaccattccatttccaagcactttcagtccaataggtgtaggaaatagcgctgtttttgttgtgtgtgcagggagggcagttttctaatggaatggtttgggaatatccatgtacttgtttgcaagcaggactttgaggcaagtgtgggccactgtggtggcagtggaggtggggtgtttgggaggctgcgtgccagtcaagaagaaaaaggtttgcattctcacattgccaggatgataagttcctttccttttctttaaagaagttgaagtttaggaatcctttggtgccaactggtgtttgaaagtagggacctcagaggtttacctagagaacaggtggtttttaagggttatcttagatgtttcacaccggaaggtttttaaacactaaaatatataatttatagttaaggctaaaaagtatatttattgcagaggatgttcataaggccagtatgatttataaatgcaatctccccttgatttaaacacacagatacacacacacacacacacacacacacaaaccttctgcctttgatgttacagatttaatacagtttatttttaaagatagatccttttataggtgagaaaaaaacaatctggaagaaaaaaaccacacaaagacattgattcagcctgtttggcgtttcccagagtcatctgattggacaggcatgggtgcaaggaaaattagggtactcaacctaagttcggttccgatgaattcttatcccctgccccttcctttaaaaaacttagtgacaaaatagacaatttgcacatcttggctatgtaattcttgtaatttttatttaggaagtgttgaagggaggtggcaagagtgtggaggctgacgtgtgagggaggacaggcgggaggaggtgtgaggaggaggctcccgaggggaaggggcggtgcccacaccggggacaggccgcagctccattttcttattgcgctgctaccgttgacttccaggcacggtttggaaatattcacatcgcttctgtgtatctctttcacattgtttgctgctattggaggatcagttttttgttttacaatgtcatatactgccatgtactagttttagttttctcttagaacattgtattacagatgccttttttgtagttttttttttttttttatgtgatcaattttgacttaatgtgattactgctctattccaaaaaggttgctgtttcacaatacctcatgcttcacttagccatggtggacccagcgggcaggttctgcctgctttggcgggcagacacgcgggcgcgatcccacacaggctggcgggggccggccccgaggccgcgtgcgtgagaaccgcgccggtgtccccagagaccaggctgtgtccctcttctcttccctgcgcctgtgatgctgggcacttcatctgatcgggggcgtagcatcatagtagtttttacagctgtgttattctttgcgtgtagctatggaagttgcataattattattattattattataacaagtgtgtcttacgtgccaccacggcgttgtacctgtaggactctcattcgggatgattggaatagcttctggaatttgttcaagttttgggtatgtttaatctgttatgtactagtgttctgtttgttattgttttgttaattacaccataatgctaatttaaagagactccaaatctcaatgaagccagctcacagtgctgtgtgccccggtcatctagcaagctgccgaaccaaaagaatttgcaccccgctgcgggcccacgtggttggggccctgccctggcagggtcatcctgtgctcggaggccatctcgggcacaggcccaccccgccccacccctccagaacacggctcacgcttacctcaaccatcctggctgcggcgtctgtctgaaccacgcgggggccttgagggacgctttgtctgtcgtgatggggcaagggcacaagtcctggatgttgtgtgtatcgagaggccaaaggctggtggcaagtgcacggggcacagcggagtctgtcctgtgacgcgcaagtctgagggtctgggcggcgggcggctgggtctgtgcatttctggttgcaccgcggcgcttcccagcaccaacatgtaaccggcatgtttccagcagaagacaaaaagacaaacatgaaagtctagaaataaaactggtaaaac

SEQ ID NO: 171 - DNA, 2582 bp, human
aaaaccaggaaaaggaggctggccggagttcctgcagagggagcgtcaaggccctgtgctgctgtccctgggggccagaggggttgcccagcatgcccactggcaggagagagggaactgacccacttgctcctaccagcttctgaaggctccaaagtccggaggtgcagaaagccaggaccaagagacaggcagctcaccagggtggacaaatcgccagagatgtggtgcattgtcctgttttcacttttggcatgggtttatgctgagcctaccatgtatggggagatcctgtcccctaactatcctcaggcatatcccagtgaggtagagaaatcttgggacatagaagttcctgaagggtatgggattcacctctacttcacccatctggacattgagctgtcagagaactgtgcgtatgactcagtgcagataatctcaggagacactgaagaagggaggctctgtggacagaggagcagtaacaatccccactctccaattgtggaagagttccaagtcccatacaacaaactccaggtgatctttaagtcagacttttccaatgaagagcgttttacggggtttgctgcatactatgttgccacagacataaatgaatgcacagattttgtagatgtcccttgtagccacttctgcaacaatttcattggtggttacttctgctcctgccccccggaatatttcctccatgatgacatgaagaattgcggagttaattgcagtggggatgtattcactgcactgattggggagattgcaagtcccaattatcccaaaccatatccagagaactcaaggtgtgaataccagatccggttggagaaagggttccaagtggtggtgaccttgcggagagaagattttgatgtggaagcagctgactcagcgggaaactgccttgacagtttagtttttgttgcaggagatcggcaatttggtccttactgtggtcatggattccctgggcctctaaatattgaaaccaagagtaatgctcttgatatcatcttccaaactgatctaacagggcaaaaaaagggctggaaacttcgctatcatggagatccaatgccctgccctaaggaagacactcccaattctgtttgggagcctgcgaaggcaaaatatgtctttagagatgtggtgcagataacctgtctggatgggtttgaagttgtggagggacgtgttggtgcaacatctttctattcgacttgtcaaagcaatggaaagtggagtaattccaaactgaaatgtcaacctgtggactgtggcattcctgaatccattgagaatggtaaagttgaagacccagagagcactttgtttggttctgtcatccgctacacttgtgaggagccatattactacatggaaaatggaggaggtggggagtatcactgtgctggtaacgggagctgggtgaatgaggtgctgggcccggagctgccgaaatgtgttccagtctgtggagtccccagagaaccctttgaagaaaaacagaggataattggaggatccgatgcagatattaaaaacttcccctggcaagtcttctttgacaacccatgggctggtggagcgctcattaatgagtactgggtgctgacggctgctcatgttgtggagggaaacagggagccaacaatgtatgttgggtccacctcagtgcagacctcacggctggcaaaatccaagatgctcactcctgagcatgtgtttattcatccgggatggaagctgctggaagtcccagaaggacgaaccaattttgataatgacattgcactggtgcggctgaaagacccagtgaaaatgggacccaccgtctctcccatctgcctaccaggcacctcttccgactacaacctcatggatggggacctgggactgatctcaggctggggccgaacagagaagagagatcgtgctgttcgcctcaaggcggcaaggttacctgtagctcctttaagaaaatgcaaagaagtgaaagtggagaaacccacagcagatgcagaggcctatgttttcactcctaacatgatctgtgctggaggagagaagggcatggatagctgtaaaggggacagtggtggggcctttgctgtacaggatcccaatgacaagaccaaattctacgcagctggcctggtgtcctgggggccccagtgtgggacctatgggctctacacacgggtaaagaactatgttgactggataatgaagactatgcaggaaaatagcaccccccgtgaggactaatccagatacatcccaccagcctctccaagggtggtgaccaatgcattaccttctgttccttatgatattctcattatttcatcatgactgaaagaagacacgagcgaatgatttaaatagaacttgattgttgagacgccttgctagaggtagagtttgatcatagaattgtgctggtcatacatttgtggtctgactccttggggtcctttccccggagtacctattgtagataacactatgggtggggcactcctttcttgcactattccaaagggataccttaattcttc

SEQ ID NO: 172 - DNA, 2400 bp, human
cgtaatgagagcccggaaccactctttgtgccgcagcttcgcagcatcttggactcaagtgattctcctgcctcagcctcctgagtagctgggactacagattcctataggcaatggaaactgatctcaattcccaggacagaaaggacctggacaagtttattaaattttttgccctcaagactgtccaagtgattgtccaggctcggcttggtgaaaagatttgcactcgttcatcatcttctccaacgggttcagattggttcaacttagcaatcaaagacatcccagaggttacacatgaagcaaagaaggcactggcaggacagctgcctgcagtcgggaggtccatgtgtgtggagatttcacttaagacttctgagggagattccatggagctggaaatatggtgtcttgaaatgaatgaaaagtgtgataaagaaatcaaagtttcctacacggtgtacaacagactgtcattgctgctgaagtcccttcttgctataactagggtgacaccagcctataggctctccaggaaacaagggcatgaatatgtcatattatacaggatatattttggagaagttcagctgagtggcttaggagaaggcttccagacagttcgtgttgggacagtgggcacccctgtgggcaccatcactctttcttgtgcttacagaattaacttggcattcatgtctaccaggcaatttgagaggaccccacctatcatggggattattattgatcactttgtggaccgtccctatcccagctcctctcccatgcacccctgcaattacagaactgctggtgaggacactggagtaatatacccgtctgtagaagactctcaagaagtgtgtaccacctctttttccacctccccaccatcccagctgatggttcctgggaaggaaggtggggtaccccttgctcccaaccagcctgtccatggtacccaggctgaccaggagagactggcaacctgcaccccttctgacagaacccactgtgctgccacaccctccagtagtgaggatactgaaaccgtatcaaacagcagtgagggacgggcctcccctcacgatgtcttggagaccatctttgtccgaaaagtgggggcttttgtcaacaaacccattaaccaggtgaccctgacgagtttggatataccctttgccatgtttgctcccaagaatttggagctggaggataccgatccaatggtgaatcctccagattccccagagactgaatctcctctccagggcagcctgcactcagatggctccagcgggggcagcagtggcaatacccatgatgactttgttatgatagactttaaaccagctttttctaaagatgacattcttccgatggacctggggaccttctatcgggagtttcagaacccacctcagctgagcagcctctccatagatattggagcacagtccatggctgaagacttggactcattaccagagaagctggctgtgcatgagaagaatgtccgcgagtttgatgcctttgtggaaaccctgcagtaaaagtatccttgagtcccagcagcaccccctttttgtggccccagggcataagcagcctcccatgcatcagctgctcccacccctcatcctgctctgagccaggtggaagggaggctggcttctcccatggggacccagaagtccctactcttggacctcctggagactccgtggcggcagtcaagcccagtgcccagttggagaagactcacgtgctggccttggagatgggaagaaccttcgtacgaaaaagccctcagcagggccatctgtgtgccctgcccatcaccaactgcttcccaagggtgtcatcctgttcctcctgctgccggcctcctgcctgggcctgccttgcagctggccccttccctgcctgctgtcaccatccactgtttgacattccagctggtggccaagagattggtgtggaggcagaaagaggaaggagacagtgccaggaggaagaaggaaggagtcccttagctctcttcattgtcccctttacttcctgctatcttcttctcctcttcttctctctcttgcctctatgcctgtatttctggcaatatgacaggcctgcctacccaagatcagaactccaaaaccactcccacccctgaaggtcgggagggtctgagcagccctggtggctgcctgtgctcaggtcctcagctccatgggaaataaaaatggcaccctgaatctctaggattttgtcacttggagtcacagcaaagttctcttcctcttgtccccccgttgctgctccttggttatagaacatggtaaatatttattactttcagagaaaccagatattttatagaggaaaaaaaaaaaaaaa

SEQ ID NO: 173 - DNA, 562 bp, human
atgcagcaccgaggcttcctcctcctcaccctcctcgccctgctggcgctcacctccgcggtcgccaaaaagaaagataaggtgaagaagggcggcccggggagcgagtgcgctgagtgggcctgggggccctgcacccccagcagcaaggattgcggcgtgggtttccgcgagggcacctgcggggcccagacccagcgcatccggtgcagggtgccctgcaactggaagaaggagtttggagccgactgcaagtacaagtttgagaactggggtgcgtgtgatgggggcacaggcaccaaagtccgccaaggcaccctgaagaaggcgcgctacaatgctcagtgccaggagaccatccgcgtcaccaagccctgcacccccaagaccaaagcaaaggccaaagccaagaaagggaagggaaaggactagacgccaagcctggatgccaaggagcccctggtgtcacatggggcctggcccacgccctccctctcccaggcccgagatgtgacccaccagtgccttctgtctgctcgttagctttaatcaatcatgcccc

SEQ ID NO: 174 - DNA, 1691 bp, human
taagaagttgtacttaaagcggaggagctaagccacctgccaaaatgtgcaaaggacttgcagctttgccccactcatgcctggaaagggccaaggagattaagatcaagttgggaattctcctccagaagccagactcagttggtgaccttgtcattccgtacaatgagaagccagagaaaccagccaagacccagaaaacctcgctggacgaggccctgcagtggcgtgattccctggacaaactcctgcagaacaactatggacttgccagtttcaaaagtttcctgaagtctgaattcagtgaggaaaaccttgagttctggattgcctgtgaggattacaagaagatcaagtcccctgccaagatggctgagaaggcaaagcaaatttatgaagaattcattcaaacggaggctcctaaagaggtgaatattgaccacttcactaaggacatcacaatgaagaacctggtggaaccttccctgagcagctttgacatggcccagaaaagaatccatgccctgatggaaaaggattctctgcctcgctttgtgcgctctgagttttatcaggagttaatcaagtagtaatttagccaggctatgaaatcatcctgtgagttatttcctccataataaccctgcatttcccattaatctacatatcttcccacagcagctttgctcagtgatacccacatgggaaaaatcccaggggatgttgcttactctttttgcccacactgctttggatacttatctactgtccgaaggccttctttccccactcaattcttcctgccctgttattaattaagatatcttcagcttgtagtcagacccaatcagaatcacagaaaaatcctgcctaaggcaaagaaatataagacaagactatgatatcaatgaatgtgggttaagtaatagatttccagctaaattggtctaaaaaagaatattaagtgtggacagacctatttcaaaggagcttaattgatctcacttgttttagttctgatccagggagatcacccctctaattatttctgaacttggttaataaaagtttataagatttttatgaagcagccactgtatgatattttaagcaaatatgttatttaaaatattgatccttcccttggaccaccttcatgttagttgggtattataaataagagatacaaccatgaatatattatgtttatacaaaatcaatctgaacacaattcataaagatttctcttttataccttcctcactggccccctccacctgcccatagtcaccaaattctgttttaaatcaatgacctaagatcaacaatgaagtattttataaatgtatttatgctgctagactgtgggtcaaatgtttccattttcaaattatttagaattcttatgagtttaaaatttgtaaatttctaaatccaatcatgtaaaatgaaactgttgctccattggagtagtctcccacctaaatatcaagatggctatatgctaaaaagagaaaatatggtcaagtctaaaatggctaattgtcctatgatgctattatcatagactaatgacatttatcttcaaaacaccaaattgtctttagaaaaattaatgtgattacaggtagaggccttctaggtgagacacttttaaggtacactgcattttgcaaaaaaaaaaaaaaaaa

SEQ ID NO: 175 - DNA, 4602 bp, human
atgaagattcagaaaaagctgactggctgcagcaggctgatgcttctgtgtctttctctggagctgctgttggaagctggggctgggaatattcactactcagtgccggaagagacagacaaaggttccttcgtaggcaacatcgccaaggacctagggctgcaaccccaggagctggcagatggcggagtccgcatcgtctccagaggtaggatgccgcttttcgctctgaatcctagaagtggcagcttgatcaccgcgcgcaggatagaccgggaggagctctgcgctcagagcatgccgtgtctcgtgagttttaatatccttgttgaggataaaatgaagctttttcctgttgaagtagaaataattgatattaatgacaacactccccaattccagttagaggaactggagtttaaaatgaatgaaataacgactccaggtaccagagtctcattgccttttgggcaagaccttgatgtgggtatgaactcactccagagctaccaactcagctctaaccctcatttctccctggatgtgcaacagggagccgatgggcctcaacatccagagatggtgctgcagagtcccttagacagagaagaagaagctgtccaccacctcatcctcacagcttctgatgggggtgaaccagtccgttcagggaccctcagaatttacattcaggtggtggatgcaaatgacaatcctccagcatttactcaggcacaataccatataaatgtccccgaaaacgtgccgctgggtactcagctgctcatggtaaatgccactgaccctgatgagggagccaatggggaagtaacgtactcctttcacaatgtagaccacagagtggcccaaatatttcgtttagattcttacacaggagaaatatcaaataaagaaccactagatttcgaagaatacaaaatgtattcaatggaagttcaagcccaggatggtgcggggctcatggctaaagttaaggtactgatcaaagttttggatgtaaatgataatgccccagaagtgaccatcacctctgtcaccactgcagttccagaaaactttcctcctgggaccataattgctcttatcagtgtgcatgaccaggactcaggagacaatggctacaccacatgtttcattcctggaaatttaccctttaaattggaaaagttagttgataattattaccgtttagtgactgaaagaacactggacagagaacttatctctgggtacaacatcacaataacagcaatagaccaaggaactccagctctatctactgaaactcacatttcactactagtgacagatatcaatgacaactccccagtcttccatcaggactcctactctgcctacattcccgaaaacaaccccagaggagcctccatcttctctgtgagggcccacgacttggacagcaatgagaatgcacaaatcacttactccctaatagaggacactatccagggggcacccctatctgcctacctctccatcaactccgacactggggtcctgtatgcgctgcgatccttcgactatgagcagttccgggacatgcaactgaaagtgatggcgcgggacagtggggatccgcccctcagcagcaacgtgtctctcagcctattcctgctggaccagaacgacaacgcgcccgagatcctgtaccccgccctccccacagatggttctaccggcgtggagctggcgcccctctccgcagagcccggctacctggtgaccaaggtggtggcggtggacagagactcgggccagaacgcctggctgtcctaccgcctgctcaaggccagcgagccgggactcttctcggtgggtctgcacacgggcgaggtgcgcacggcgcgagccctgctggacagagacgcgctcaagcagagtctcgtggtggccgtccaggaccacggccagcccccgctctccgccactgtcacgctcaccgtggccgtggccgacaggatctccgacatcctggccgacctgggcagcctcgagccctccgccaaacccaacgattcggacctcactctgtacctggtggtggcggcggccgcggtctcctgcgtcttcctggccttcgtcatcgtgctgctggcgcacaggctgcggcgctggcacaagtcacgtctgctacaggcttcgggaggcggcttagcgagcatgcccggttcgcactttgtgggcgtggacggggttcgggctttcctgcagacctattcccacgaggtctccctcactgcggactcgcggaagagccacctgattttcccccagcccaactatgcggacacactcatcagccaggagagctgtgagaaaaagggttttctatcagcaccccagtctttacttgaagacaaaaaggaaccattttctcagcaagccccgcccaacacggactggcgtttctctcaggcccagagacccggcaccagcggctcccaaaatggcgatgacaccggcacctggcccaacaaccagtttgacacagagatgctgcaagccatgatcttggcgtccgccagtgaagctgctgatgggagctccaccctgggagggggtgccggcaccatgggattgagcgcccgctacggaccccagttcaccctgcagcacgtgcccgactaccgccagaatgtctacatcccaggcagcaatgccacactgaccaacgcagctggcaagcgggatggcaaggccccagcaggtggcaatggcaacaagaagaagtcgggcaagaaggagaagaagtaacatggaggccaggccaagagccacagggcggcctctccccaaccagcccagcttctccttacctgcacccaggcctcagagtttcagggctaacccccagaatactggtaggggccaaggccatgctccccttgggaaacagaaacaagtgcccagtcagcacctaccccttcccccccagggggttgaatatgcaaaagcagttccgctgggaacccccatccaatcaactgctgtacccatgggggtagtggggttactgtagacaccaagaaccatttgccacaccccgtttagttacagctgaactcctccatcttccaaatcaatcaggcccatccatcccatgcctccctcctccccaccccactccaacagttcctctttcccgagtaaggtggttggggtgttgaagtaccaagtaacctacaagcctcctagttctgaaaagttggaagggcatcatgacctcttggcctctcctttgattctcaatcttcccccaaagcatggtttggtgccagccccttcacctccttccagagcccaagatcaatgctcaagttttggaggacatgatcaccatccccatggtactgatgcttgctggatttagggagggcattttgctaccaagcctcttcccaacgccctggggaccagtcttctgttttgtttttcattgtttgacgtttccactgcatgccttgacttcccccacctcctcctcaaacaagagactccactgcatgttccaagacagtatggggtggtaagataaggaagggaagtgtgtggatgtggatggtgggggcatggacaaagcttgacacatcaagttatcaaggccttggaggaggctctgtatgtcctcaggggactgacaacatcctccagattccagccataaaccaataactaggctggacccttcccactacataatagggctcagcccaggcagccagctttgggctgagctaacaggaccaatggattaaactggcatttcagtccaaggaagctcgaagcaggtttaggaccaggtccccttgagaggtcagaggggcctctgtgggtgctgggtactccagaggtgccactggtggaagggtcagcggagccccagcaggaagggtgggccagccaggccattcttagtccctgggttggggaggcagggagctagggcagggaccaaatgaacagaaagtctcagcccaggatggggcttcttcaacagggcccctgccctcctgaagcctcagtccttcaccttgccaggtgccgtttctcttccgtgaaggccactgcccaggtccccagtgcgccccctagtggccatagcctggttaaagttccccagtgcctccttgtgcatagaccttcttctcccacccccttctgcccctgggtccccggccatccagcggggctgccagagaaccccagacctgcccttacagtagtgtagcgccccctccctctttcggctggtgtagaatagccagtagtgtagtgcggtgtgcttttacgtgatggcgggtgggcagcgggcggcgggctccgcgcagccgtctgtccttgatctgcccgcggcggcccgtgttgtgttttgtgctgtgtccacgcgctaaggcgaccccctcccccgtactgacttctcctataagcgcttctcttcgcatagtcacgtagctcccaccccaccctcttcctgtgtctcacgcaagttttatactctaatatttatatggctttttttcttcgacaaaaaaataataaaacgtttcttctgaaaagctg

SEQ ID NO: 176 - DNA, 956 bp, human
aagtaaatgcagcactagtgggtgggattgaggctatgccctggtgcataaatagagactcagctgtgctggcacactcagaagcttggaccgcatcctagccgccgactcacacaaggcaggtgggtgaggaaatccagagttgccatggagaaaattccagtgtcagcattcttgctccttgtggccctctcctacactctggccagagataccacagtcaaacctggagccaaaaaggacacaaaggactctcgacccaaactgccccagaccctctccagaggttggggtgaccaactcatctggactcagacatatgaagaagctctatataaatccaagacaagcaacaaacccttgatgattattcatcacttggatgagtgcccacacagtcaagctttaaagaaagtgtttgctgaaaataaagaaatccagaaattggcagagcagtttgtcctcctcaatctggtttatgaaacaactgacaaacacctttctcctgatggccagtatgtccccaggattatgtttgttgacccatctctgacagttagagccgatatcactggaagatattcaaatcgtctctatgcttacgaacctgcagatacagctctgttgcttgacaacatgaagaaagctctcaagttgctgaagactgaattgtaaagaaaaaaaatctccaagcccttctgtctgtcaggccttgagacttgaaaccagaagaagtgtgagaagactggctagtgtggaagcatagtgaacacactgattaggttatggtttaatgttacaacaactattttttaagaaaaacaagttttagaaatttggtttcaagtgtacatgtgtgaaaacaatattgtatactaccatagtgagccatgattttctaaaaaaaaaaataaatgttttgggggtgttctgttttctccaaaaaaaaaaaaaaa

SEQ ID NO: 177 - DNA, 1008 bp, human
ggcgcaacgaaagtcaatggcggtctggagagactggcggaagctagctttgcaatatggcggccgaggcggacggaccgcttaaacggctgctcgtgccgattcttttacctgagaaatgctacgaccaacttttcgttcagtgggacttgcttcacgtcccctgcctcaagattctcctcagcaaaggcctggggctgggcattgtggctggctcacttctagtaaagctgccccaggtgtttaaaatcctgggagccaagagtgctgaagggttgagtctccagtctgtaatgctggagctagtggcattgactgggaccatggtctacagcatcactaacaacttcccattcagctcttggggtgaagccttattcctgatgctccagacgatcaccatctgcttcctggtcatgcactacagaggacagactgtgaaaggtgtcgctttcctcgcttgctacggcctggtcctgctggtgcttctctcacctctgacgcccttgactgtagtcaccctgctccaggcctccaatgtgcctgctgtggtggtggggaggcttctccaggcagccaccaataccacaacgggcacacaggccagctctcagccatcacagtcttcctgctgtttgggggctccctggcccgaatcttcacttccattcaggaaaccggagatcccctgatggctgggacctttgtggtctcctctctctgcaacggcctcatcgccgcccagctgctcttctactggaatgcaaagcctccccacaagcagaaaaaggcgcagtagagccagctactggagtcattccgtttccactcattcacccaacctcagggttctccccatctgagccagcctgctggtgtgacttactcatcctccattcctctgcacttgcagactttctgagccagggttttcttttagtggaaacaaatggttgatggatccagaaccttagaaaaggagaggatgggggtagagtctccaagccg

SEQ ID NO: 178 - DNA, 1342 bp, human
gaattcgggcggccgcggcccgggtccctcgcaaagccgctgccatcccggagggcccagccagcgggctcccggaggctggccgggcaggcgtggtgcgcggtaggagctgggcgcgcacggctaccgcgcgtggaggagacactgccctgccgcgatgggggcccggggcgctccttcacgccgtaggcaagcggggcggcggctgcggtacctgcccaccgggagctttcccttccttctcctgctgctgctgctctgcatccagctcgggggaggacagaagaaaaaggagaatcttttagctgaaaaagtagagcagctgatggaatggagttccagacgctcaatcttccgaatgaatggtgataaattccgaaaatttataaaggcaccacctcgaaactattccatgattgttatgttcactgctcttcagcctcagcggcagtgttctgtgtgcaggcaagctaatgaagaatatcaaatactggcgaactcctggcgctattcatctgctttttgtaacaagctcttcttcagtatggtggactatgatgaggggacagacgtttttcagcagctcaacatgaactctgctcctacattcatgcattttcctccaaaaggcagacctaagagagctgatacttttgacctccaaagaattggatttgcagctgagcaactagcaaagtggattgctgacagaacggatgttcatattcgggttttcagaccacccaactactctggtaccattgctttggccctgttagtgtcgcttgttggaggtttgctttatttgagaaggaacaacttggagttcatctataacaagactggttgggccatggtgtctctgtgtatagtctttgctatgacttctggccagatgtggaaccatatccgtggacctccatatgctcataagaacccacacaatggacaagtgagctacattcatgggagcagccaggctcagtttgtggcagaatcacacattattctggtactgaatgccgctatcaccatggggatggttcttctaaatgaagcagcaacttcgaaaggcgatgttggaaaaagacggataatttgcctagtgggattgggcctggtggtcttcttcttcagttttctactttcaatatttcgttccaagtaccacggctatccttatagtgatctggactttgagtgagaagatgtgatttggaccatggcacttaaaaactctataacctcagccttttaattaaatgaagccaagtgggatttgcataaagtgaatgtttaccatgaagataaactgttcctgactttatactattttgaattc

SEQ ID NO: 179 - DNA, 3930 bp, human
gggcgggaggaggactgtatctctggatgcctggggcctggtttcagggcctgatttattcctcttcctgggagctcactcaggaaaggtcctttctggggatcaccccattggctgaagatgagaccattcttcctcttgtgttttgccctgcctggcctcctgcatgcccaacaagcctgctcccgtggggcctgctatccacctgttggggacctgcttgttgggaggacccggtttctccgagcttcatctacctgtggactgaccaagcctgagacctactgcacccagtatggcgagtggcagatgaaatgctgcaagtgtgactccaggcagcctcacaactactacagtcaccgagtagagaatgtggcttcatcctccggccccatgcgctggtggcagtcccagaatgatgtgaaccctgtctctctgcagctggacctggacaggagattccagcttcaagaagtcatgatggagttccgagggcccatgcctgccggcatgctgattgagcgctcctcagacttcggtaagacctggcgagtgtaccagtacctggctgccgactgcacctccaccttccctcgggtccgccagggtcggcctcagagctggcaggatgttcggtgccagtccctgcctcagaggcctaatgcacgcctaaatggggggaaggtccaacttaaccttatggatttagtgtctgggattccagcaactcaaagtcaaaaaattcaagaggtgggggagatcacaaacttgagagtcaatttcaccaggctggcccctgtgccccaaaggggctaccaccctcccagcgcctactatgctgtgtcccagctccgtctgcaggggagctgcttctgtcacggccatgctgatcgctgcgcacccaagcctggggcctctgcaggctccaccgctgtgcaggtccacgatgtctgcgtctgccagcacaacactgccggcccaaattgtgagcgctgtgcacccttctacaacaaccggccctggagaccggcggagggccaggacgcccatgaatgccaaaggtgcgactgcaatgggcactcagagacatgtcactttgaccccgctgtgtttgccgccagccagggggcatatggaggtgtgtgtgacaattgccgggaccacaccgaaggcaagaactgtgagcggtgtcagctgcactatttccggaaccggcgcccgggagcttccattcaggagacctgcatctcctgcgagtgtgatccggatggggcagtcgcaggggctccctgtgacccagtgaccgggcagtgtgtgtgcaaggagcatgtgcagggagagcgctgtgacctatgcaagccgggcttcactggactcacctacgccaacccgcgacggtgccaccgctgtgactgcaacatcctggggtcccgggagatgccgtgtgacgaggagagtgggcgctgcctttgtctgcccaacgtggtgggtcccaaatgtgaccagtgtgctccctaccactggaagctggccagtggccagggctgtgaaccgtgtgcctgcgacccgcacaactccctcagcccacagtgcaaccagttcacagggcagtgcccctgtcgggaaggctttggtggcctgatgtgcagcgctgcagccatccgccagtgtccagaccggacctatggagacgtggccacaggatgccgagcctgtgactgtgatttccggggaacagagggcccgggctgcgacaaggcatcaggccgctgcctctgccgccctggcttgaccgggccccgctgtgaccagtgccagcgaggctactgcaatcgctacccggtgtgcgtggcctgccacccttgcttccagacctatgatgcggacctccgggagcaggccctgcgctttggtagactcccgaatgccaccgccagcctgtggtcagggcctgggctggaggaccgtggcctggcctcccggatcctagatgcaaagagtaagattgagcagatccgagcagttctcagcagccccgcagtcacagagcaggaggtggctcaggtggccagtgccatcctctccctcaggcgaactctccagggcctgcagctggatctgcccctggaggaggagacgttgtcccttccgagagacctggagagtcttgacagaagcttcaatggtctccttactatgtatcagaggaagagggagcagtttgaaaaaataagcagtgctgatccttcaggagccttccggatgctgagcacagcctacgagcagtcagcccaggctgctcagcaggtctccgacagctcgcgccttttggaccagctcagggacagccggagagaggcagagaggctggtgcggcaggcgggaggaggaggaggcaccggcagccccaagcttgtggccctgaggttggagatgtcttcgttgcctgacctgacacccaccttcaacaagctctgtggcaactccaggcagatggcttgcaccccaatatcatgccctggtgagctatgtccccaagacaatggcacagcctgtgcgtcccgctgcaggggtgtccttcccagggccggtggggccttcttgatggcggggcaggtggctgagcagctgcggggcttcaatgcccagctccagcggaccaggcagatgattagggcagccgaggaatctgcctcacagattcaatccagtgcccagcgcttggagacccaggtgagcgccagccgctcccagatggaggaagatgtcagacgcacacggctcctaatccagcaggtccgggacttcctaacagaccccgacactgatgcagccactatccaggaggtcagcgaggccgtgctggccctgtggctgcccacagactcagctactgttctgcagaagatgaatgagatccaggccattgcagccaggctccccaacgtggacttggtgctgtcccagaccaagcaggacattgcgcgtgcccgccggttgcaggctgaggctgaggaagccaggagccgagcccatgcagtggagggccaggtggaggatgtggttgggaacctgcggcaggggacagtggcactgcaggaagctcaggacaccatgcaaggcaccagccggtcccttcggcttatccaggacagggttgctgaggttcagcaggtactgcggccagcagaaaagctggtgacaagcatgaccaagcagctgggtgacttctggacacggatggaggagctccgccaccaagcccggcagcagggggcagaggcagtccaggcccagcagcttgcggaaggtgccagcgagcaggcattgagtgcccaagagggatttgagagaataaaacaaaagtatgctgagttgaaggaccggttgggtcagagttccatgctgggtgagcagggtgcccggatccagagtgtgaagacagaggcagaggagctgtttggggagaccatggagatgatggacaggatgaaagacatggagttggagctgctgcggggcagccaggccatcatgctgcgctcagcggacctgacaggactggagaagcgtgtggagcagatccgtgaccacatcaatgggcgcgtgctctactatgccacctgcaagtgatgctacacgttccagcccgttgccccactcatctgcgcgctttgcttttggttggggggcagattgggttggaatgctttccatctccaggagactttcatgtagcccaaagtacagcctggaccacccctggtgtgtgtagctagtaagattaccctgagctgcagctgagcctgagccaatgggacagttacacttgacagacaaagatggtggagattggcatgccattgaaactaagagctctcaagtcaaggaagctgggctgggcagtatcccccgcctttagttctccac

SEQ ID NO: 180 - DNA, 1620 bp, human
ctctaaagacctacctagatgtggacggggcctggcgcaccaccagctgtgacaccaagctgcagggggctgtgtgtggggttagcagtgggccccctcctccccgaagaataagctaccatggcagctgtccccagggactggcagactccgcgtggattcccttccgggagcactgctattctttccacatggagctgctgctgggccacaaggaggcgcgacagcgctgccagagagcgggtggggccgtcctgtctatcctggatgagatggagaatgtgtttgtctgggagcacctgcagagctatgaggccagagtcggggcgcctggctgggcatgaacttcaaccccaaaggaggcactctggtctggcaggacaacacagctgtgaactactccaactgggggcccccgggcttgggccccagcatgctgagccacaacagctgctactggattcagacaacagcgggctatggcgccccggcgcttgcaccaacatcaccatgggtgtcgtctgcaagcttcctcgtgctgaacagacacttctccccatcagcgcttccagaaaaccagcggccctggtggtggtgctgatggcggtgctgctgctcctggccttgctgaccgcagccctcatcctttaccggaggcgccagaacatcgagcgcggggcctttgagggtgcccgctacagccgcagcagctccagccccaccgaggccactgaaaaaaacatcctggtgtcagacatggaaatgaatgagcaacaagaatacaaccacgcgcgtgggcagggccagggcgggaagatctggggaactggggccctgggtcagtctggccccccaccagctgcctgtccatttggcctatggaagggtgcccttgggagtccctgttcccaaccggaactgggcataccctgggctggtggggtgccaccctcccacaagggctgggctgagacccagctgagtgcaccgtggcgtttccctttctgggggggcctgaggtcttgtcacctggtcctgtgcccccaccggaaccatatgttagatgggaaggggaacgagacctctttctccccagagcccccggcccaggcctgtttcatccgcgccccaggaccccttctttgcagagcccgaggagcctcccctgtcccctcgggcagatctgttgtgtctctcttcccacctggcagcctcagctctgtgcccctcaccctgctccctctcgccccttctctcccaccccttccttctgagccgggccctggggattggggagccctcttgttcctgatgagggtcagctgagggggctgagcatccatcactcctgtgcctgctggggtggctgtggggcgtggcaggagggcctaggtgggttgggcctgagaaccagggcacgggtgtggtgtctgctgggctggagataagactggggagagacaccccaacctcccagggtgggagctgggccgggctgggatgtcatctcctgccgggcgggggagggctctgcccctggaagagtcccctgtggggaccaaataaagttccctaacatctccagctcctggctctggtttggagcaaggggaagggttg

SEQ ID NO: 181 - DNA, 1322 bp, human
ggaattccgggcgcggttgtgagtagtaccgggagtggggtgatcccgggctaggggagcgcggcgcccgatcgggcttagtcggagctccgaagggagtgactaggacacccgggtgggctacttttcttccggtgcttttgctttttttttcctttgggctcgggctgagtgtcgcccactgagcaaagattccctcgtaaaacccagagcgaccctcccgtcaattgttgggctcgggagtgtcgcggtgccccgagcgcgccgggcgcggaggcaaagggagcggagccggccgcggacggggcccggagcttgcctgcctccctcgctcgccccagcgggttcgctcgcgtagagcgcagggcgcgcgcgatgaaggcggtgagcccggtgcgcccctcgggccgcaaggcgccgtcgggctgcggcggcggggagctggcgctgcgctgcctggccgagcacggccacagcctgggtggctccgcagccgcggcggcggcggcggcggcagcgcgctgtaaggcggccgaggcggcggccgacgagccggcgctgtgcctgcagtgcgatatgaacgactgctatagccgcctgcggaggctggtgcccaccatcccgcccaacaagaaagtcagcaaagtggagatcctgcagcacgttatcgactacatcctggacctgcagctggcgctggagacgcacccggccctgctgaggcagccaccaccgcccgcgccgccacaccacccggccgggacctgtccagccgcgccgccgcggaccccgctcactgcgctcaacaccgacccggccggcgcggtgaacaagcagggcgacagcattctgtgccgctgagccgcgctgtccaggtgtgcggccgcctgagcccgagccaggagcactagagagggagggggaagagcagaagttagagaaaaaaagccaccggaggaaaggaaaaaacatcggccaacctagaaacgttttcattcgtcattccaagagagagagaggaaagaaaaatacaactttcattctttctttgcacgttcataaacattctacatacgtattctcttttgtctcttcatttataactgctgtgaattgtacatttctgtgttttttggaggtgcagttaaacttttaagcttaagtgtgacaggactgataaatagaagatcaagagtagatccgactttagaagcctactttgtgaccaaggagctcaatttttgttttgaagctttactaatctaccagagcattgtagatattttttttttacatctattgtttaaaatagccggaattcc

SEQ ID NO: 182 - DNA, 5381 bp, human
gagcgagggagggagcgaaggaggtagagaagagtggaggcgccaggggagggagcgtagcttggttgctccgtagtacggcggctcgcgaggaagaatcccgagcgggctccgggacggacagagaggcgggcggggatggtgtgcggggctgcggctcctgcgtccctcccagcggcgcgtgagcggcactgatttgtccctggggcggcagcgcggacccgcccggagatgaggcgtcgattagcaaggtaaaagtaacagaaccatggctcagtttccaacaccttttggtggcagcctggatatctgggccataactgtagaggaaagagcgaagcatgatcagcagttccatagtttaaagccaatatctggattcattactggtgatcaagctagaaactttttttttcaatctgggttacctcaacctgttttagcacagatatgggcactagctgacatgaataatgatggaagaatggatcaagtggagttttccatagctatgaaacttatcaaactgaagctacaaggatatcagctaccctctgcacttccccctgtcatgaaacagcaaccagttgctatttctagcgcaccagcatttggtatgggaggtatcgccagcatgccaccgcttacagctgttgctccagtgccaatgggatccattccagttgttggaatgtctccaaccctagtatcttctgttcccacagcagctgtgccccccctggctaacggggctccccctgttatacaacctctgcctgcatttgctcatcctgcagccacattgccaaagagttcttcctttagtagatctggtccagggtcacaactaaacactaaattacaaaaggcacagtcatttgatgtggccagtgtcccaccagtggcagagtgggctgttcctcagtcatcaagactgaaatacaggcaattattcaatagtcatgacaaaactatgagtggacacttaacaggtccccaagcaagaactattcttatgcagtcaagtttaccacaggctcagctggcttcaatatggaatctttctgacattgatcaagatggaaaacttacagcagaggaatttatcctggcaatgcacctcattgatgtagctatgtctggccaaccactgccacctgtcctgcctccagaatacattccaccttcttttagaagagttcgatctggcagtggtatatctgtcataagctcaacatctgtagatcagaggctaccagaggaaccagttttagaagatgaacaacaacaattagaaaagaaattacctgtaacgtttgaagataagaagcgggagaactttgaacgtggcaacctggaactggagaaacgaaggcaagctctcctggaacagcagcgcaaggagcaggagcgcctggcccagctggagcgggcggagcaggagaggaaggagcgtgagcgccaggagcaagagcgcaaaagacaactggaactggagaagcaactggaaaagcagcgggagctagaacggcagagagaggaggagaggaggaaagaaattgagaggcgagaggctgcaaaacgggaacttgaaaggcaacgacaacttgagtgggaacggaatcgaaggcaagaactactaaatcaaagaaacaaagaacaagaggacatagttgtactgaaagcaaagaaaaagactttggaatttgaattagaagctctaaatgataaaaagcatcaactagaagggaaacttcaagatatcagatgtcgattgaccacccaaaggcaagaaattgagagcacaaacaaatctagagagttgagaattgccgaaatcacccatctacagcaacaattacaggaatctcagcaaatgcttggaagacttattccagaaaaacagatactcaatgaccaattaaaacaagttcagcagaacagtttgcacagagattcacttgttacacttaaaagagccttagaagcaaaagaactagctcggcagcacctacgagaccaactggatgaagtggagaaagaaactagatcaaaactacaggagattgatattttcaataatcagctgaaggaactaagagaaatacacaataagcaacaactccagaagcaaaagtccatggaggctgaacgactgaaacagaaagaacaagaacgaaagatcatagaattagaaaaacaaaaagaagaagcccaaagacgagctcaggaaagggacaagcagtggctggagcatgtgcagcaggaggacgagcatcagagaccaagaaaactccacgaagaggaaaaactgaaaagggaggagagtgtcaaaaagaaggatggcgaggaaaaaggcaaacaggaagcacaagacaagctgggtcggcttttccatcaacaccaagaaccagctaagccagctgtccaggcaccctggtccactgcagaaaaaggtccacttaccatttctgcacaggaaaatgtaaaagtggtgtattaccgggcactgtacccctttgaatccagaagccatgatgaaatcactatccagccaggagacatagtcatggttaaaggggaatgggtggatgaaagccaaactggagaacccggctggcttggaggagaattaaaaggaaagacagggtggttccctgcaaactatgcagagaaaatcccagaaaatgaggttcccgctccagtgaaaccagtgactgattcaacatctgcccctgcccccaaactggccttgcgtgagacccccgcccctttggcagtaacctcttcagagccctccacgacccctaataactgggccgacttcagctccacgtggcccaccagcacgaatgagaaaccagaaacggataactgggatgcatgggcagcccagccctctctcaccgttccaagtgccggccagttaaggcagaggtccgcctttactccagccacggccactggctcctccccgtctcctgtgctaggccagggtgaaaaggtggaggggctacaagctcaagccctatatccttggagagccaaaaaagacaaccacttaaattttaacaaaaatgatgtcatcaccgtcctggaacagcaagacatgtggtggtttggagaagttcaaggtcagaagggttggttccccaagtcttacgtgaaactcatttcagggcccataaggaagtctacaagcatggattctggttcttcagagagtcctgctagtctaaagcgagtagcctctccagcagccaagccggtcgtttcgggagaagaatttattgccatgtacacttacgagagttctgagcaaggagatttaacctttcagcaaggggatgtgattttggttaccaagaaagatggtgactggtggacaggaacagtgggcgacaaggccggagtcttcccttctaactatgtgaggcttaaagattcagagggctctggaactgctgggaaaacagggagtttaggaaaaaaacctgaaattgcccaggttattgcctcatacaccgccaccggccccgagcagctcactctcgcccctggtcagctgattttgatccgaaaaaagaacccaggtggatggtgggaaggagagctgcaagcacgtgggaaaaagcgccagataggctggttcccagctaattatgtaaagcttctaagccctgggacgagcaaaatcactccaacagagccacctaagtcaacagcattagcggcagtgtgccaggtgattgggatgtacgactacaccgcgcagaatgacgatgagctggccttcaacaagggccagatcatcaacgtcctcaacaaggaggaccctgactggtggaaaggagaagtcaatggacaagtggggctcttcccatccaattatgtgaagctgaccacagacatggacccaagccagcaatgaatcatatgttgtccatccccccctcaggcttgaaagtcctcaaagagacccactatcccatatcactgcccagagggatgatgggagatgcagccttgatcatgtgacttccagcatgatcacctactgccttctgagtagaagaactcactgcagagcagtttacctcattttaccttagttgcatgtgatcgcaatgtttgagttattacttgcagagataggagcaaaaattacaaaaacacacagggtagtgggtccttttgtggctttcctagttactcaaattgactttcccccacctttgcacaggtgctttcaatagttttaaaattatttttaaatatatattttagctttttaataaacaaaataaataaatgacttctttgctattttggttttgcaaaaagacccactatcaaggaatgctgcatgtgctattaaaaattgttccaaatgtccataaatctgagacttgatgtattttttcattttgtccagtgttaccaactaaattgtgcagtttggggcttttcccccttaccatagaagtgcagaggagttcagtatctctgttttaaagacgtatagaatgagcccaattaaagcgaaggtgtttgtgcttgtttgtgtgtatcagctgtaccttgttgagcatgtaatacatcctgtacataagaaattagttctttccatggcaaagctattaccttgtacgatgctctaatcatattgcatttaattttattttgcacagtgaccttgtagccacatgagaaagcactctgtgtttttgttcggtctcagatttatctggttgagttggtgttttgtttggggtttttaattttgcgtgtttgcatagcataaaatcagtagacaacaccactgaggtcgttacgatcaacgatatccacagtctctttttagtctctgttacatgaagttttattccagttacttttcatggaatgacctattttgaacaagtaattttcttgacaagaaagaatgtatagaagtctccctgcaattaatttccaatgtttacattttttaactagactgtggaatttctacagattaatatgaaatggagctcatggtccgtttgtgtgttagatatgctgtagctgaagccctgtttgtcttttaaacactagttggaagctctcaataaaaatgcctgctgctcacagcacagaaaatggggcagggggagcctcaagcacaatctagctgtcctcctaaagactctgtaatgctcactcccctcgcgttctcccggcgctgtcgggaggctgtgctggtggtcgtgtagaggtccttctcctttcacatggtgcagagagcgaggacctctcctcctcgttcagttgcacttcagtattttcacggatatgaatgtaaaatatataaatatataaacctgcggctttaacaactg

SEQ ID NO: 183 - DNA, 478 bp, human
  misc_feature (408)..(408): n is a, c, g, or t
  misc_feature (458)..(458): n is a, c, g, or t
  misc_feature (460)..(460): n is a, c, g, or t
tagttttaatatttatttagcagaggggtaaattgaaacatcagttctctagaccagtcaggaaatgtatgctttgtgctttataagcttacattcaacatagatgacataagttaccatactcaaatgtaagatagggagaggtagaagaaatagctgagaacttgaaaagatgtactgttattgtcaacaaaccaatgtcttctcccttcataaaattgtgtttagggaatattaacaattaagcttgtatacaatagtaattttgaatgtatttttaaatttattttttcaaaataatgacattagtaaaaattttacatagcctgtattgaattcacacattcaaatgaggctttaccagtaatgatggggattaatacagagctagtgtttggcatttgactntatctcaaatgagctaactgctcaatgaattacagaagactcatactctntntattttttcctggaaatt

SEQ ID NO: 184 - DNA, 1683 bp, human
ctctgagtgtccagtggtcagttgccccaggatggggaccacagccagagcagccttggtcttgacctatttggctgttgcttctgctgcctctgagggaggcttcacggctacaggacagaggcagctgaggccagagcactttcaagaagttggctacgcagctcccccctccccacccctatcccgaagcctccccatggatcaccctgactcctctcagcatggccctccctttgagggacagagtcaagtgcagccccctccctctcaggaggccacccctctccaacaggaaaagctgctacctgcccaactccctgctgaaaaggaagtgggtccccctctccctcaggaagctgtccccctccaaaaagagctgccctctctccagcaccccaatgaacagaaggaaggaacgccagctccatttggggaccagagccatccagaacctgagtcctggaatgcagcccagcactgccaacaggaccggtcccaagggggctggggccaccggctggatggcttcccccctgggcggccttctccagacaatctgaaccaaatctgccttcctaaccgtcagcatgtggtatatggtccctggaacctaccacagtccagctactcccacctcactcgccagggtgagaccctcaatttcctggagattggatattcccgctgctgccactgccgcagccacacaaaccgcctagagtgtgccaaacttgtgtgggaggaagcaatgagccgattctgtgaggccgagttctcggtcaagacccgaccccactggtgctgcacgcggcagggggaggctcggttctcctgcttccaggaggaagctccccagccacactaccagctccgggcctgccccagccatcagcctgatatttcctcgggtcttgagctgcctttccctcctggggtgcccacattggacaatatcaagaacatctgccacctgaggcgcttccgctctgtgccacgcaacctgccagctactgaccccctacaaagggagctgctggcactgatccagctggagagggagttccagcgctgctgccgccaggggaacaatcacacctgtacatggaaggcctgggaggatacccttgacaaatactgtgaccgggagtatgctgtgaagacccaccaccacttgtgttgccgccaccctcccagccctactcgggatgagtgctttgcccgtcgggctccttaccccaactatgaccgggacatcttgaccattgacatcagtcgagtcacccccaacctcatgggccacctctgtggaaaccaaagagttctcaccaagcataaacatattcctgggctgatccacaacatgactgcccgctgctgtgacctgccatttccagaacaggcctgctgtgcagaggaggagaaattaaccttcatcaatgatctgtgtggtccccgacgtaacatctggcgagaccctgccctctgctgttacctgagtcctggggatgaacaggtcaactgcttcaacatcaattatctgaggaacgtggctctagtgtctggagacactgagaacgccaagggccagggggagcagggctcaactggaggaacaaatatcagctccacctctgagcccaaggaagaatgagtcaccccagagccctagagggtcagatg

SEQ ID NO: 185 - DNA, 755 bp, human
  misc_feature (643)..(643): n is a, c, g, or t
  misc_feature (741)..(741): n is a, c, g, or t
tggtagtgaatactttattttgttgtaaacaagttagttttgagggtatttcctcgtggtcctcctgccgtcactcgtccccatgttccaatgatgctgatcaactgctttattcagtttcccatctttcttcttgcccaggcatcgtagcctttctttttttaaacacatgatccctagtactcatctttggaggacaaaaggctttccatatgttagaaaaatttgaatctcatagtactcacaacaatgagcagcattgtaagttgtgatgcattcatttggattggaacattctcaatcagtccttccactctaagtaaatatttgtttctcacagaacacaaggcagttcaaaaggcctcttggttaaggaattatagggtgttgaatgggaaacatcatacaagcagtgaaaacaaaaatctttccaggttgtcggattttctccttcttggtcttataaaaagcaactagacatctctaatttaaaaaatacatgcacatatatacaatagtgattggaatgtattcttatccaaaacattatagagtttatctcagatatactgagtactgtcactcagtctgtaaattacccccaagaaggtgggttgtttcctcattccttaaataaaaacangatcgaataacagaccaaaaagaagttactaaattttaacactgacatccttgtgaagagccagtctttacaggcgtttgtaaagtagactgtggggnagtgtacactaata

SEQ ID NO: 186 - DNA, 570 bp, human
  misc_feature (446)..(446): n is a, c, g, or t
  misc_feature (490)..(490): n is a, c, g, or t
  misc_feature (520)..(520): n is a, c, g, or t
cgaagtagacaaagacatggagagtgtgattcccaagacagactgcaggttacggcctgacatcagagccatggaaaatggagagatagatcaagctagtgaagaaaaaaaacgacttgaggaaaaacaaagagcagcccgcaaaaacaggtccaagtcagaagaggactggaagaccgaggtggttccatcaaggtcctaatccctacaatggagcacaggactggatttactctggcagctactgggacagaaattacttcaatttgcctgacatttattaaaatgcatacaagtcagggtgtttggctaatctacaaataagtcttaaacctatgtttttaaatttttttcccttggtttctacttatcttttaaaaaaaaaatgaaaaaacactcatgagataactgcatttcaccccaacaaaagcaggggtataaggcgntattgggtgatgaaagtccttagggaaaatgcataatttttgcnataaatggtacctaatttggggatacccantttatatagagggtaagagacactgcttgggggatatgccttttatgggt

SEQ ID NO: 187 - DNA, 701 bp, human
ggcacgaggggggagacctccaggcgcagggaaggacggccagggtgacacggaagcatgcgacggctgctgatccctctggccctgtggctgggcgcggtgggcgtgggcgtcgccgagctcacggaagcccagcgccggggcctgcaggtggccctggaggaatttcacaagcacccgcccgtgcagtgggccttccaggagaccagtgtggagagcgccgtggacacgcccttcccagctggaatatttgtgaggctggaatttaagctgcagcagacaagctgccggaagagggactggaagaaacccgagtgcaaagtcaggcccaatgggaggaaacggaaatgcctggcctgcatcaaactgggctctgaggacaaagttctgggccggttggtccactgccccatagagacccaagttctgcgggaggctgaggagcaccaggagacccagtgcctcagggtgcagcgggctggtgaggacccccacagcttctacttccctggacagttcgccttctccaaggccctgccccgcagctaagccagcactgagctgcgtggtgcctccaggaccgctgccggtggtaaccagtggaagaccccagcccccagggagaggaccccgttctatccccagccatgataataaagctgctctcccagctgcctctcaaaaaaaaaaaaaaaaaaaaa

SEQ ID NO: 188 - DNA, 787 bp, human
  misc_feature (525)..(525): n is a, c, g, or t
  misc_feature (631)..(631): n is a, c, g, or t
  misc_feature (683)..(683): n is a, c, g, or t
tttttgctaaattcttttatttttgtttaaattttcacttcaattttaattcttgaagaacagcctcgacaacatatatcgcactcattataagaagcaaagggttatatcaaaaattattagtatagaatcacaggaaatctggtttggaaccagaaaaaaatacaaaacagatatagatacatagacacaggacaattttttataattatttggaaaaatggtatttccccctaattcttgtttcctttttctttatgcgcatacgatgtttaaattttacaaaaaatgaaaataaagactagtattttacaaaatgaataacaatgttcagtgtgtgtgtgtttctacataggcttcagtccacttccatatgtgttgttcctgtacagaatatatccacatccgtccacaataaatcctggaaggtccattagtttccttctgttttattaaaattctcatggtcctctcttccaatttgtttttctttttttcaccagacagacacaaggttcttttttntgtgggtttgttttcctcgccacgtgctcacagatctgatcctaaagagctcttttcccatgcttgtagctcggattggatcttgctggtgggctgctctgctcgnccctctccctccaccaagcctgcttgcccgctgacttttcctgtaccgcggngtttgaatcttggcccaagtgtcccttgattcttaggggacgggcagttgaagccccaggctatagccctgatgggcctgtaggccgtgactgtcccacagaca

SEQ ID NO: 189 - DNA, 1667 bp, human
ggcacgaggcttccccttcccctcccagcgcgcccgcgcgccccgcggccctcggcgagcagctcggctccccccagcgctccccgggcccaaagatatggcaatggtagttagcagctggcgagatccgcaggacgacgtggccgggggcaaccccggcggccccaaccccgcagcgcaggcggcccgcggcggcggcggcggcgccggcgagcagcagcagcaggcgggctcgggcgcgccgcacacgccgcagaccccgggccagcccggagcgcccgccacccccggcacggcgggggacaagggccagggcccgcccggttcgggccagagccagcagcacatcgagtgcgtggtgtgcggggacaagtcgagcggcaagcactacggccaattcacctgcgagggctgcaaaagtttcttcaagaggagcgtccgcaggaacttaacttacacatgccgtgccaacaggaactgtcccatcgaccagcaccaccgcaaccagtgccaatactgccgcctcaagaagtgcctcaaagtgggcatgaggcgggaagcggttcagcgaggaagaatgcctccaacccagcccaatccaggccagtacgcactcaccaacggggaccccctcaacggccactgctacctgtccggctacatctcgctgctgctgcgcgccgagccctaccccacgtcgcgctacggcagccagtgcatgcagcccaacaacattatgggcatcgagaacatctgcgagctggccgcgcgcctgctcttcagcgccgtcgagtgggcccgcaacatccccttcttcccggatctgcagatcaccgaccaggtgtccctgctacgcctcacctggagcgagctgttcgtgctcaacgcggcccagtgctctatgccgctgcacgtggcgccgttgctggccgccgccggcctgcatgcctcgcccatgtctgccgaccgcgtcgtggccttcatggaccacatccgcatcttccaggagcaggtggagaagctcaaggcgctacacgtcgactcagccgagtacagctgcctcaaagccatcgtgctgttcacgtcagacgcctgtggcctgtcggatgcggcccacatcgagagcctgcaggagaagtcgcagtgcgcactggaggagtacgtgaggagccagtaccccaaccagcccagccgttttggcaaactgctgctgcgactgccctcgctgcgcaccgtgtcctcctccgtcatcgagcagctcttcttcgtccgtttggtaggtaaaacccccatcgaaactctcatccgcgatatgttactgtctgggagcagcttcaactggccttacatgtccatccagtgctcctagaccttgggcgcttcccacctgccccgtccccctagagactcagaggacccacctgggccaaggactccaaagccgcggggacaccgggaagtgcagcgggccaggcaggctgggtgggagggaggagggccgagacaggagcagcccacccagcagaaatacaatccgagctacaaagcatgggaaaaagagactcttttaggatcagatctgtgagcacgttggcgaggaaaaacaaaacaaacaaaaaaaagaaccttgtgtctgtctggtgaaaaaaaaaaaaaaaaaaaaaaaa

SEQ ID NO: 190 - DNA, 926 bp, human
gcgacgggacgcgctgggaccggcgtcgggggtcgcggggaccatgcagcggaggtgggtcttcgtgctgctcgacgtgctgtgcttactggtcgcctccctgcccttcgctatcctgacgctggtgaacgccccgtacaagcgaggattttactgcggggatgactccatccggtacccctaccgtccagataccatcacccacgggctcatggctggggtcaccatcacggccaccgtcatccttgtctcggccggggaagcctacctggtgtacacagaccggctctattctcgctcggacttcaacaactacgtggctgctgtatacaaggtgctggggaccttcctgtttggggctgccgtgagccagtctctgacagacctggccaagtacatgattgggcgtctgaggcccaacttcctagccgtctgcgaccccgactggagccgggtcaactgctcggtctatgtgcagctggagaaggtgtgcaggggaaaccctgctgatgtcaccgaggccaggttgtctttctactcgggacactcttcctttgggatgtactgcatggtgttcttggcgctgtatgtgcaggcacgactctgttggaagtgggcacggctgctgcgacccacagtccagttcttcctggtggcctttgccctctacgtgggctacacccgcgtgtctgattacaaacaccactggagcgatgtccttgttggcctcctgcagggggcactggtggctgccctcactgtctgctacatctcagacttcttcaaagcccgacccccacagcactgtctgaaggaggaggagctggaacggaagcccagcctgtcactgacgttgaccctgggcgaggctgaccacaaccactatggatacccgcactcctcctcctgaggccggaccccgccca

SEQ ID NO: 191 - DNA, 9645 bp, human
atgcccaagcgcgcgcactggggggccctctccgtggtgctgatcctgctttggggccatccgcgagtggcgctggcctgcccgcatccttgtgcctgctacgtccccagcgaggtccactgcacgttccgatccctggcttccgtgcccgctggcattgctagacacgtggaaagaatcaatttggggtttaatagcatacaggccctgtcagaaacctcatttgcaggactgaccaagttggagctacttatgattcacggcaatgagatcccaagcatccccgatggagctttaagagacctcagctctcttcaggttttcaagttcagctacaacaagctgagagtgatcacaggacagaccctccagggtctctctaacttaatgaggctgcacattgaccacaacaagatcgagtttatccaccctcaagctttcaacggcttaacgtctctgaggctactccatttggaaggaaatctcctccaccagctgcaccccagcaccttctccacgttcacatttttggattatttcagactctccaccataaggcacctctacttagcagagaacatggttagaactcttcctgccagcatgcttcggaacatgccgcttctggagaatctttacttgcagggaaatccgtggacctgcgattgtgagatgagatggtttttggaatgggatgcaaaatccagaggaattctgaagtgtaaaaaggacaaagcttatgaaggcggtcagttgtgtgcaatgtgcttcagtccaaagaagttgtacaaacatgagatacacaagctgaaggacatgacttgtctgaagccttcaatagagtcccctctgagacagaacaggagcaggagtattgaggaggagcaagaacaggaagaggatggtggcagccagctcatcctggagaaattccaactgccccagtggagcatctctttgaatatgaccgacgagcacgggaacatggtgaacttggtctgtgacatcaagaaaccaatggatgtgtacaagattcacttgaaccaaacggatcctccagatattgacataaatgcaacagttgccttggactttgagtgtccaatgacccgagaaaactatgaaaagctatggaaattgatagcatactacagtgaagttcccgtgaagctacacagagagctcatgctcagcaaagaccccagagtcagctaccagtacaggcaggatgctgatgaggaagctctttactacacaggtgtgagagcccagattcttgcagaaccagaatgggtcatgcagccatccatagatatccagctgaaccgacgtcagagtacggccaagaaggtgctactttcctactacacccagtattctcaaacaatatccaccaaagatacaaggcaggctcggggcagaagctgggtaatgattgagcctagtggagctgtgcaaagagatcagactgtcctggaagggggtccatgccagttgagctgcaacgtgaaagcttctgagagtccatctatcttctgggtgcttccagatggctccatcctgaaagcgcccatggatgacccagacagcaagttctccattctcagcagtggctggctgaggatcaagtccatggagccatctgactcaggcttgtaccagtgcattgctcaagtgagggatgaaatggaccgcatggtatatagggtacttgtgcagtctccctccactcagccagccgagaaagacacagtgacaattggcaagaacccaggggagtcggtgacattgccttgcaatgctttagcaatacccgaagcccaccttagctggattcttccaaacagaaggataattaatgatttggctaacacatcacatgtatacatgttgccaaatggaactctttccatcccaaaggtccaagtcagtgatagtggttactacagatgtgtggctgtcaaccagcaaggggcagaccattttacggtgggaatcacagtgaccaagaaagggtctggcttgccatccaaaagaggcagacgcccaggtgcaaaggctctttccagagtcagagaagacatcgtggaggatgaagggggctcgggcatgggagatgaagagaacacttcaaggagacttctgcatccaaaggaccaagaggtgttcctcaaaacaaaggatgatgccatcaatggagacaagaaagccaagaaagggagaagaaagctgaaactctggaagcattcggaaaaagaaccagagaccaatgttgcagaaggtcgcagagtgtttgaatctagacgaaggataaacatggcaaacaaacagattaatccggagcgctgggctgatattttagccaaagtccgtgggaaaaatctccctaagggcacagaagtacccccgttgattaaaaccacaagtcctccatccttgagcctagaagtcacaccaccttttcctgctgtttctcccccctcagcatctcctgtgcagacagtaaccagtgctgaagaatcctcagcagatgtacctctacttggtgaagaagagcacgttttgggtaccatttcctcagccagcatggggctagaacacaaccacaatggagttattcttgttgaacctgaagtaacaagcacacctctggaggaagttgttgatgacctttctgagaagactgaggagataacttccactgaaggagacctgaaggggacagcagcccctacacttatatctgagccttatgaaccatctcctactctgcacacattagacacagtctatgaaaagcccacccatgaagagacggcaacagagggttggtctgcagcagatgttggatcgtcaccagagcccacatccagtgagtatgagcctccattggatgctgtctccttggctgagtctgagcccatgcaatactttgacccagatttggagactaagtcacaaccagatgaggataagatgaaagaagacacctttgcacaccttactccaacccccaccatctgggttaatgactccagtacatcacagttatttgaggattctactataggggaaccaggtgtcccaggccaatcacatctacaaggactgacagacaacatccaccttgtgaaaagtagtctaagcactcaagacaccttactgattaaaaagggtatgaaagagatgtctcagacactacagggaggaaatatgctagagggagaccccacacactccagaagttctgagagtgagggccaagagagcaaatccatcactttgcctgactccacactgggtataatgagcagtatgtctccagttaagaagcctgcggaaaccacagttggtaccctcctagacaaagacaccacaacagtaacaacaacaccaaggcaaaaagttgctccgtcatccaccatgagcactcacccttctcgaaggagacccaacgggagaaggagattacgccccaacaaattccgccaccggcacaagcaaaccccacccacaacttttgccccatcagagactttttctactcaaccaactcaagcacctgacattaagatttcaagtcaagtggagagttctctggttcctacagcttgggtggataacacagttaatacccccaaacagttggaaatggagaagaatgcagaacccacatccaagggaacaccacggagaaaacacgggaagaggccaaacaaacatcgatataccccttctacagtgagctcaagagcgtccggatccaagcccagcccttctccagaaaataaacatagaaacattgttactcccagttcagaaactatacttttgcctagaactgtttctctgaaaactgagggcccttatgattccttagattacatgacaaccaccagaaaaatatattcatcttaccctaaagtccaagagacacttccagtcacatataaacccacatcagatggaaaagaaattaaggatgatgttgccacaaatgttgacaaacataaaagtgacattttagtcactggtgaatcaattactaatgccataccaacttctcgctccttggtctccactatgggagaatttaaggaagaatcctctcctgtaggctttccaggaactccaacctggaatccctcaaggacggcccagcctgggaggctacagacagacatacctgttaccacttctggggaaaatcttacagaccctccccttcttaaagagcttgaggatgtggatttcacttccgagtttttgtcctctttgacagtctccacaccatttcaccaggaagaagctggttcttccacaactctctcaagcataaaagtggaggtggcttcaagtcaggcagaaaccaccacccttgatcaagatcatcttgaaaccactgtggctattctcctttctgaaactagaccacagaatcacacccctactgctgcccggatgaaggagccagcatcctcgtccccatccacaattctcatgtctttgggacaaaccaccaccactaagccagcacttcccagtccaagaatatctcaagcatctagagattccaaggaaaatgttttcttgaattatgtggggaatccagaaacagaagcaaccccagtcaacaatgaaggaacacagcatatgtcagggccaaatgaattatcaacaccctcttccgaccgggatgcatttaacttgtctacaaagctggaattggaaaagcaagtatttggtagtaggagtctaccacgtggcccagatagccaacgccaggatggaagagttcatgcttctcatcaactaaccagagtccctgccaaacccatcctaccaacagcaacagtgaggctacctgaaatgtccacacaaagcgcttccagatactttgtaacttcccagtcacctcgtcactggaccaacaaaccggaaataactacatatccttctggggctttgccagagaacaaacagtttacaactccaagattatcaagtacaacaattcctctcccattgcacatgtccaaacccagcattcctagtaagtttactgaccgaagaactgaccaattcaatggttactccaaagtgtttggaaataacaacatccctgaggcaagaaacccagttggaaagcctcccagtccaagaattcctcattattccaatggaagactccctttctttaccaacaagactctttcttttccacagttgggagtcacccggagaccccagatacccacttctcctgccccagtaatgagagagagaaaagttattccaggttcctacaacaggatacattcccatagcaccttccatctggactttggccctccggcacctccgttgttgcacactccgcagaccacgggatcaccctcaactaacttacagaatatccctatggtctcttccacccagagttctatctcctttataacatcttctgtccagtcctcaggaagcttccaccagagcagctcaaagttctttgcaggaggacctcctgcatccaaattctggtctcttggggaaaagccccaaatcctcaccaagtccccacagactgtgtccgtcaccgctgagacagacactgtgttcccctgtgaggcaacaggaaaaccaaagcctttcgttacttggacaaaggtttccacaggagctcttatgactccgaataccaggatacaacggtttgaggttctcaagaacggtaccttagtgatacggaaggttcaagtacaagatcgaggccagtatatgtgcaccgccagcaacctgcacggcctggacaggatggtggtcttgctttcggtcaccgtgcagcaacctcaaatcctagcctcccactaccaggacgtcactgtctacctgggagacaccattgcaatggagtgtctggccaaagggaccccagccccccaaatttcctggatcttccctgacaggagggtgtggcaaactgtgtcccccgtggagagccgcatcaccctgcacgaaaaccggaccctttccatcaaggaggcgtccttctcagacagaggcgtctataagtgcgtggccagcaatgcagccggggcggacagcctggccatccgcctgcacgtggcggcactgccccccgttatccaccaggagaagctggagaacatctcgctgcccccggggctcagcattcacattcactgcactgccaaggctgcgcccctgcccagcgtgcgctgggtgctcggggacggtacccagatccgcccctcgcagttcctccacgggaacttgtttgttttccccaacgggacgctctacatccgcaacctcgcgcccaaggacagcgggcgctatgagtgcgtggccgccaacctggtaggctccgcgcgcaggacggtgcagctgaacgtgcagcgtgcagcagccaacgcgcgcatcacgggcacctccccgcggaggacggacgtcaggtacggaggaaccctcaagctggactgcagcgcctcgggggacccctggccgcgcatcctctggaggctgccgtccaagaggatgatcgacgcgctcttcagttttgatagcagaatcaaggtgtttgccaatgggaccctggtggtgaaatcagtgacggacaaagatgccggagattacctgtgcgtagctcgaaataaggttggtgatgactacgtggtgctcaaagtggatgtggtgatgaaaccggccaagattgaacacaaggaggagaacgaccacaaagtcttctacgggggtgacctgaaagtggactgtgtggccaccgggcttcccaatcccgagatctcctggagcctcccagacgggagtctggtgaactccttcatgcagtcggatgacagcggtggacgcaccaagcgctatgtcgtcttcaacaatgggacactctactttaacgaagtggggatgagggaggaaggagactacacctgctttgctgaaaatcaggtcgggaaggacgagatgagagtcagagtcaaggtggtgacagcgcccgccaccatccggaacaagacttacttggcggttcaggtgccctatggagacgtggtcactgtagcctgtgaggccaaaggagaacccatgcccaaggtgacttggttgtccccaaccaacaaggtgatccccacctcctctgagaagtatcagatataccaagatggcactctccttattcagaaagcccagcgttctgacagcggcaactacacctgcctggtcaggaacagcgcgggagaggataggaagacggtgtggattcacgtcaacgtccagccacccaagatcaacggtaaccccaaccccatcaccaccgtgcgggagatagcagccgggggcagtcggaaactgattgactgcaaagctgaaggcatccccaccccgagggtgttatgggcttttcccgagggtgtggttctgccagctccatactatggaaaccggatcactgtccatggcaacggttccctggacatcaggagtttgaggaagagcgactccgtccagctggtatgcatggcacgcaacgagggaggggaggcgaggttgatcgtgcagctcactgtcctggagcccatggagaaacccatcttccacgacccgatcagcgagaagatcacggccatggcgggccacaccatcagcctcaactgctctgccgcggggaccccgacacccagcctggtgtgggtccttcccaatggcaccgatctgcagagtggacagcagctgcagcgcttctaccacaaggctgacggcatgctacacattagcggtctctcctcggtggacgctggggcctaccgctgcgtggcccgcaatgccgctggccacacggagaggctggtctccctgaaggtgggactgaagccagaagcaaacaagcagtatcataacctggtcagcatcatcaatggtgagaccctgaagctcccctgcacccctcccggggctgggcagggacgtttctcctggacgctccccaatggcatgcatctggagggcccccaaaccctgggacgcgtttctcttctggacaatggcaccctcacggttcgtgaggcctcggtgtttgacaggggtacctatgtatgcaggatggagacggagtacggcccttcggtcaccagcatccccgtgattgtgatcgcctatcctccccggatcaccagcgagcccaccccggtcatctacacccggcccgggaacaccgtgaaactgaactgcatggctatggggattcccaaagctgacatcacgtgggagttaccggataagtcgcatctgaaggcaggggttcaggctcgtctgtatggaaacagatttcttcacccccagggatcactgaccatccagcatgccacacagagagatgccggcttctacaagtgcatggcaaaaaacattctcggcagtgactccaaaacaacttacatccacgtcttctgaaatgtggattccagaatgattgcttaggaactgacaacaaagcggggtttgtaagggaagccaggttggggaataggagctcttaaataatgtgtcacagtgcatggtggcctctggtgggtttcaagttgaggttgatcttgatctacaattgttgggaaaaggaagcaatgcagacacgagaaggagggctcagccttgctgagacactttcttttgtgtttacatcatgccaggggcttcattcagggtgtctgtgctctgactgcaatttttcttcttttgcaaatgccactcgactgccttcataagcgtccataggatatctgaggaacattcatcaaaaataagccatagacatgaacaacacctcactaccccattgaagacgcatcacctagttaacctgctgcagtttttacatgatagactttgttccagattgacaagtcatctttcagttatttcctctgtcacttcaaaactccagcttgcccaataaggatttagaaccagagtgactgatatatatatatatattttaattcagagttacatacatacagctaccattttatatgaaaaaagaaaaacatttcttcctggaactcactttttatataatgttttatatatatattttttcctttcaaatcagacgatgagactagaaggagaaatactttctgtcttattaaaattaataaattattggtctttacaagacttggatacattacagcagacatggaaatataattttaaaaaatttctctccaacctccttcaaattcagtcaccactgttatattaccttctccaggaaccctccagtggggaaggctgcgatattagatttccttgtatgcaaagtttttgttgaaagctgtgctcagaggaggtgagaggagaggaaggagaaaactgcatcataactttacagaattgaatctagagtcttccccgaaaagcccagaaacttctctgcagtatctggcttgtccatctggtctaaggtggctgcttcttccccagccatgagtcagtttgtgcccatgaataatacacgacctgttatttccatgactgctttactgtatttttaaggtcaatatactgtacatttgataataaaataatattctcccaaaaaaaaaa

SEQ ID NO: 192 - DNA, 4253 bp, human
ggtcatttgtccagaaaactttgtgactgtctttgagtgacctagtctgggacccattcattggtgggttctaaggttagaagctcatccaggatattttcaatattaagtcagtgcatagctgcaccactaacaaattggtgcctgtagagtcagagtgggtcaattcttaggacaatggcgctggcactgttagaggactggtgcaggataatgagtgtggatgagcagaagtcactgatggttacggggataccggcggactttgaggaggctgagattcaggaggtccttcaggagactttaaagtctctgggcaggtatagactgcttggcaagatattccggaagcaggagaatgccaatgctgtcttactagagcttctggaagatactgatgtctcggccattcccagtgaggtccagggaaaggggggtgtctggaaggtgatctttaagacccctaatcaggacactgagtttcttgaaagattgaacctgtttctagaaaaagaggggcagacggtctcgggtatgtttcgagccctggggcaggagggcgtgtctccagccacagtgccctgcatctcaccagaattactggcccatttgttgggacaggcaatggcacatgcgcctcagcccctgctacccatgagataccggaaactgcgagtattctcagggagtgctgtcccagccccagaggaagagtcctttgaggtctggttggaacaggccacggagatagtcaaagagtggccagtaacagaggcagaaaagaaaaggtggctggcggaaagcctgcggggccctgccctggacctcatgcacatagtgcaggcagacaacccgtccatcagtgtagaagagtgtttggaggcctttaagcaagtgtttgggagcctagagagccgcaggacagcccaggtgaggtatctgaagacctatcaggaggaaggagagaaggtctcagcctatgtgttacggctagaaaccctgctccggagagcggtggagaaacgcgccatccctcggcgtattgcggaccaggtccgcctggagcaggtcatggctggggccactcttaaccagatgctgtggtgccggcttagggagctgaaggatcagggcccgccccccagcttccttgagctaatgaaggtaatacgggaagaagaggaggaagaggcctcctttgagaatgagagtatcgaagagccagaggaacgagatggctatggccgctggaatcatgagggagacgactgaaaaccacctgggggcaggacccacagccagtgggctaagacctttaaaaaatttttttctttaatgtatgggactgaaatcaaaccatgaaagccaattattgaccttccttccttccttccttccctcccttcctccttctctccttctctcctcctctctcctctcctctcctctctttccttccttccttccttttttctttttctctttcttctttatttcttgggtctcactctcatcacccaggctagagtgcagtggcacaaaaatctcggctcactgcagccttgacttcccaggctcaggctcaggtgatcctcacaccttagcctcccaagtacctgggactacaggcacgcaccaccatgcctagctattcttttgtatttttggtagagacagggttttgctgtgttgctcaggctggtctggaacccctaggctcaaatgatgtgcccaactcggcctcccaaagtgctgggattacaggcatgaaccgccatgcctggcccttgatttttctttttaagaaaaaaatatctaggagtttcttagaccctatgtagattattaatgaacaaaagattaaactccaaatattaaatagtaagcctgaaggaatctgaaacacttgtacttccaattttctttaaataatcccaaatagaccagaattggcccataccatagaagaaagaattggcagtcaaaaaaaaaaataccttttgtaatgtttgaaaaataaagctgtttgacttgtcaggtgttttcctttctcaaatcagcaaattctctctgagtgcctggctttgtgagacactgtacaaggagttacaagactacagctataacctgcagttgagcagttataaacctacaaaatgggccctgccctcagagaggttccagtctagatgaggagctgatctagacaggtaaaaggctaactaaccctttgtgtaaataagttcatcaccccagtaaaagtgtcatcacccagtgaataggaccacctctgcctgcagatttttgttgttgttgttgtcattgttgttgttgttttaacctgggaagtgttcttcctgcctttctgctaggtgtcagatagatggtcccagagctaggtgctgtgtcaggccctgaagacacagatgactcaacctaagctttactttccagaggtccacagcctgagaggtgtccccaaagaaagggggacatgaggggactgcatgcttgagagcagggttgtttagggcaggtttggatttagtgagcaggctggtttgcttagagaaggcttttagtggcaacaaaggatgaagaggagagaaaaggaactcacatttattgagggcctactgtgtgcaaagtgtttcatgtatatctcattgaatgtatacagccaccctgttgtggtataattttgctctttataaagagaaagaccgaagctcagatgagttaagtggtctcctcaacaccaaaatgccaagaagtgatggagcctagacagaagcccagaactttctgactcacactagtccatcctctaccatcacgatgactttcaaattgtgctctgcagttctgcagattttctagcagtgccatctccaaaatgtgttttaaactctttatttttttaattattattagtattattttgagactgagtcttgctctatcacccaggctggagtgcagtggtgcaatctcagctcactgcaacctctgcctcccaggttcaagcgatttcgtgcctcagcctcccgagtagctgggattacaggcacccaccaccacgcccagctaatttttgtatttttagtagaaatggggtttcaccatgttggccaggctggtctcgaactcctgacctcaagtgatccactcacctcggcctcccaaagtgctgggattacaggtgtgagccaccatgcctgggctaaactctttaagtctctagtaaatgcagctagattcaaatgggctgataaccaaattttaacacatcagcattcaccaccaggtttacttttattttcagattggctcattttgtgcagaccttagagcaaagtttcctttatggtatctgtgtacgtatccaaacttcttttaattgttcacagattttaaaagcggtagcaccacatggttgtgtagatcagacctgtgtatttagatcagacctgtgtatcacgtaagtgtgtgagtgcagtgcagatgagcaccatttagttatatgtgctaggcaaatctccaacacagttgatgtgtagtcttgtggtagatttgtgcatactgtaagcaaattgcttagcttctctagacatcagtttccacatctgaaaaataagaagatgagagtacacggttgttatgaacaaatgacttaatgctttttaagcacgttgcatgacatctggaacacagaaagccctcaatacattgaagctcttaggattttcacgatgttcctgtctgctcaatgcatgctttctttattgttctgacagttgtgtggtaacaagctaatatgcttccagttgacttccagtctaccctggtgttagaaaccgtttcatctcttattgtaaatttgagtgcttgttgttttttatatttgtgatgactcttccagcagttgttgacaattgttagaggtttgacttttaaataattacttattttttctgattgtggttcagtttaactgaagaatatcctgagattgtaagaaaagcattttttaaaaggtatcacttgtgatcatttatctttctaaattctatttttaatactgttccaccaaagtgatgcagtggttaccatgacaccctaatttcatgtgtttttgtatttatgaaaatagtttcattgtcatttattggcggtatacaaagtaaaatgttataaatgtgaagttataaaataaatatatgctaataaaatcctgagtttttctgattcct

SEQ ID NO: 193 - DNA, 1768 bp, human
ggcacgaggctgctgtctgcggaggaaactgcatcgacggacggccgcccagctacgggaggacctggagtggcactgggcgcccgacggaccatccccgggacccgcctgcccctcggcgccccgccccgccgggccgctccccgtcgggttccccagccacagccttacctacgggctcctgactccgcaaggcttccagaagatgctcgaaccaccggccggggcctcggggcagcagtgagggaggcgtccagccccccactcagctcttctcctcctgtgccaggggctccccgggggatgagcatggtggttttccctcggagccccctggctcgggacgtctgagaagatgccggtcatgaggctgttcccttgcttcctgcagctcctggccgggctggcgctgcctgctgtgcccccccagcagtgggccttgtctgctgggaacggctcgtcagaggtggaagtggtacccttccaggaagtgtggggccgcagctactgccgggcgctggagaggctggtggacgtcgtgtccgagtaccccagcgaggtggagcacatgttcagcccatcctgtgtctccctgctgcgctgcaccggctgctgcggcgatgagaatctgcactgtgtgccggtggagacggccaatgtcaccatgcagctcctaaagatccgttctggggaccggccctcctacgtggagctgacgttctctcagcacgttcgctgcgaatgccggcctctgcgggagaagatgaagccggaaaggaggagacccaagggcagggggaagaggaggagagagaagcagagacccacagactgccacctgtgcggcgatgctgttccccggaggtaacccaccccttggaggagagagaccccgcacccggctcgtgtatttattaccgtcacactcttcagtgactcctgctggtacctgccctctatttattagccaactgtttccctgctgaatgcctcgctcccttcaagacgaggggcagggaaggacaggaccctcaggaattcagtgccttcaacaacgtgagagaaagagagaagccagccacagacccctgggagcttccgctttgaaagaagcaagacacgtggcctcgtgaggggcaagctaggccccagaggccctggaggtctccaggggcctgcagaaggaaagaagggggccctgctacctgttcttgggcctcaggctctgcacagtcaagcagcccttgctttcggagctcctgtccaaaagtagggatgcggatcctgctggggccgccacggcctggctggtgggaaggccggcagcgggcggaggggatccagccacttccccctcttcttctgaagatcagaacattcagctctggagaacagtggttgcctgggggcttttgccactccttgtcccccgtgatctcccctcacactttgccatttgcttgtactgggacattgttctttccggccaaggtgccaccaccctgccccccctaagagacacatacagagtgggccccgggctggagaaagagctgcctggatgagaaacagctcagccagtggggatgaggtcaccaggggaggagcctgtgcgtcccagctgaaggcagtggcaggggagcaggttccccaagggccctggcacccccacaagctgtccctgcagggccatctgactgccaagccagattctcttgaataaagtattctagtgtggaaaaaaaaaaaaaaaaaaaaaaaaaaaaaa

SEQ ID NO: 194 - DNA, 2727 bp, human
cccggcgccgccgccgccctgccgcccccgccagccgcgccgtgacgcgggcatgagcctgctccgcggcgccgctgagcaggcgctcctggcccgggcctcggcgcccagcaggcgcggggcgaaggagctgctagaacaatgctgaggcgggtgaggtgaggagcagcccctcgcggcagccccgacagagtgtctggaacaggtgattggaggagccggagacccaggcacctgggcatccttcccctcgcctctgccaggccccgcgcccctaaaaggtgggaaaaccatggcgaccaatttcagtgacatcgtcaagcaaggctacgtgaagatgaagagcaggaagctcgggatctaccggaggtgctggctggtgttccggaaatcctccagcaaggggccccagcggctggagaagtatccagatgagaagtcggtgtgcctccggggctgccccaaggtgactgagatcagcaacgtcaagtgtgttacgcggctccccaaggagaccaagcggcaggcggtggccatcatattcactgatgactcggcacgtaccttcacctgcgactcagagctagaggcagaggagtggtacaagacactatctgtggagtgtctggggtcccgcctcaacgacatcagtctgggagaacctgacctcctggccccaggggtgcagtgtgaacagacagatcgcttcaatgtcttcctgctgccctgccccaacctggacgtgtatggcgagtgcaagctgcagatcacccacgagaacatctacctctgggacatccacaacccccgtgtgaagctcgtctcgtggcccctctgctcactgcgccgctatggccgggatgccacacgctttaccttcgaggctggccggatgtgtgatgctggggaaggactctataccttccagacacaagagggggagcagatttaccagcgcgtccacagtgccaccctggccatcgcagagcagcacaagcgggtcctgctggaaatggagaagaacgtgaggctgctgaacaagggcacggaacattactcgtatccctgcacacccacgaccatgctgccgcgcagtgcctactggcaccacatcactggttcccagaacatcgccgaagcctccagctatgctggtgaggggtatggggcagcccaggccagctcggaaacagacctcctcaacagattcatcctgctaaagccaaagcccagccagggggacagcagtgaggccaagaccccatcccagtgaccacagtgctggcgagcaccgatgactgctgggggctgcctgctgcggggctggctgcagtgtaccgtggacagcctcagggggctgtcggccaagagcctggagaaagggagcaagctgccccctccttgcccccaaggatgaggctggactgaggcaaagggctggccacaccacctgagcatgtgtgaggggttggagctaccgtgggactatatactgttaatgattttaatatatatggcttatgacatactctgtatcaatgagatcccctcaccctcaccccatccttccccaccaatacacacaaattttttaatcccatgaccaggccacggtcaaggctgtttttgagtatgagtgcagtcgtgtccatcctccatggcacagccctcctgctgccaggacctgcttgaactaccagggccacaggagggggataatcagagcttgaggctggcactctgactgctggcttttcccaaacagcccaagggccggaacagcaggtggcttctcagttcctctgggcctggagtgacacaggaaggatctgcacttcctctgtgctgcttgccagccttgcagttggagttttaagcagaggtgacatctggttgacgcctcaggtgaaaatctggttttaaaatgtaacttctgcacaggctccttcctgctttgtaggctgggaagatgcccctggggtaggggtgctgattacctcagccatgtggaggaaggctggagcttgttcctgccccaggaataggccaggagggaaggccgcagcaggactgccgtggggagcacccctgctgcccccctctcactgaccaggggtggacaatgcccaagcagagggagcccccttgccctgtttggccaccctctggccagccaaaagcactctgaaaccaagaccttcccattcctcctccccacatggtgctgaggctccctgctgcaatgcaattaaagcaattgattttctagtgctggtatttgttgactaccatgcagaagggctatctttctattcacgtcaaacttttggttgtgtggggttttttgttgttttttgggttttgttttttaatactttagggtcctgatttgtgggaacagaccttcttgtaaataaccactatttgagttgtggcaggaggatgataaagcacgcggcccctcccaaaggagcccttgagctagggaggtggtgcagtcagcctcgctctcaacgtgacccggggaatgaccacccagagggatgagctagcctgtagaggggaactggggtccaaaggtctttggggagggaggcagagctggctggctcagctaagtggcacgatgacgcatgaaggagattatgttgtgctctttattgccaaaaataaacacttttaaaaagaaaaaaaaaaaaaaaaaaaaaaaaaaaaaaaaaaaaaaaa

SEQ ID NO: 195 - DNA, 772 bp, human
  misc_feature (575)..(575): n is a, c, g, or t
  misc_feature (691)..(691): n is a, c, g, or t
  misc_feature (756)..(756): n is a, c, g, or t
gcattataaacttttatgcattttattcaaaccaattttctttaagtaaaaacttaacagtgtcatcaaaaccacactgatacaaagattccattttcctcttgcttgggggaaaaagggcttggttgagtctcaccaggtttgccagggacaacatgatatcctgcttggcgatattaacatacagatctagctgccctttgtcctgcggggagatgtccagtcgtccactgaagggggagatggttactgtccggccgacgggcaggatgggaagagcgttggtgaggcctccgtccacccacttctgccctttgtattccactagcttcagtcctgcataaatgggcacaaaactgctggctaggaggaccttaatgaggtcctccctggaggaaaaagtggagactaagtgattttctctggttttggcgttggtgatggatacgtgcagtcggttctgggccagctcgtgagcgctgggaggaagaatcgactccatcccacttcttagtcgggccatgaagtcataaccgggcgttactgccccgaaagactgccttctgatttcttcngcaaacttgtaggtaaattggttacattcctctattttttctggtgctgttagcagaacagaagcaaccacgatcccgcagacgccccagcgaagctttgacatccttcacaagtnttttgcatgtctgcaagtgcagatgctgcccccaagtgtaaatgcccagaaatcacacgcttcanatgatagggtgatgtg

SEQ ID NO: 196 - DNA, 420 bp, human
gggcggttctccaagcacccagcatcctgctagacgcgccgcgcaccgacggaggggacatgggcagagcaatggtggccaggctcgggctggggctgctgctgctggcactgctcctacccacgcagatttattccagtgaaacaacaactggaacttcaagtaactcctcccagagtacttccaactctgggttggccccaaatccaactaatgccaccaccaaggtggctggtggtgccctgcagtcaacagccagtctcttcgtggtctcactctctcttctgcatctctactcttaagagactcaggccaagaaacgtcttctaaatttccccatcttctaaacccaatccaaatggcgtctggaagtccaatgtggcaaggaaaaacaggtcttcatcgaatctactaattcca

SEQ ID NO: 197 - DNA, 1557 bp, human
ctggcgggactggcggggatcgccgtggactgcctcaggggcgccgcagcccgctcggcccgagggcccgcctaaccgcgccgcccgcgcccgctcctcctcggcccgcgcccggagcgcgggggccgccggcgctgggtactcggcggccaccggggatcggggctgagcggtcggttcccgcccccgtgccgccgccgccgccttccggccgaccgcccggcttggccgctgctgccgcgtctggcccccgggtccccgccgctgggggcgcgggcggggtcgggggttgccgggcgccgccccccgtgcgcctggagtccacatcccgggcccggcggccggcgagcatggaggagaagtacctgcccgagctgatggcggagaaggactccctggacccctccttcacgcacgccctgcgcctggtgaaccaagaaatagaaaagtttcaaaaaggagaaggcaaggatgaagaaaagtacatcgatgtggtgattaataagaacatgaagctgggacagaaagtgttaattcccgtaaaacagttccctaagttcaactttgtggggaaacttttgggtccacgtggcaattctctgaagcgtttacaagaagaaaccttgacaaaaatgtccatccttgggaaaggttccatgagagacaaggccaaggaagaagagttgaggaaaagtggagaagcgaagtacttccatctcaatgatgatctccatgttctcattgaagtgtttgccccacctgcagaagcttatgccaggatgggacatgctttggaagaaatcaaaaagttcctcatccctgattataatgatgagatcaggcaagcacagctccaggagttaacatatttgaatggtggttcagaaaatgcagatgttccagtggttcgagggaaacccaccttgcgtacaagaggtgtaccagccccagcaataaccaggggaaggggaggagttacagcccggccagttggagttgtagtaccacgagggacgccaactcccagaggagtcctgtccacccgagggccagtgagtcggggaagaggacttctcactcccagagcaagaggagtccccccaactgggtacagacctccaccgccacccccgacacaagagacttatggagaatatgactatgatgatggatatggcactgcttatgatgaacagagttatgattcctatgataacagctatagcaccccagcccaaagtggtgctgattactatgattacggacatggactcagtgaggagacttatgattcctacgggcaagaagagtggactaactcaagacacaaggcaccttcagcgaggacagcaaagggcgtctacagagaccagccatatggcagatactgattgtactgtctgatgttgtgaaatagccaatctccaccagtcctgtatactgttcaaagtaatttttttctatgaacaatccctttttaaataaatcaaaatgcttaaaatctgaatggatggaacttaaaactactttgttgaaacatcaacctgggtagaaaaa

SEQ ID NO: 198 - DNA, 1542 bp, human
ggcacgaggcatcctgccacccctagccttgctggggacgtgaaccctctccccgcgcctgggaagccttcttggcaccgggacccggagaatccccacggaagccagttccaaaagggatgaaaagggggcgtttcgggcactgggagaagcctgtattccagggcccctcccagagcaggaatctgggacccaggagtgccagcctcacccacgcagatcctggccatgagagctccgcacctccacctctccgccgcctctggcgcccgggctctggcgaagctgctgccgctgctgatggcgcaactctgggccgcagaggcggcgctgctcccccaaaacgacacgcgcttggaccccgaagcctatggcgccccgtgcgcgcgcggctcgcagccctggcaggtctcgctcttcaacggcctctcgttccactgcgcgggtgtcctggtggaccagagttgggtgctgacggccgcgcactgcggaaacaagccactgtgggctcgagtaggggatgaccacctgctgcttcttcagggcgagcagctccgccggacgactcgctctgttgtccatcccaagtaccaccagggctcaggccccatcctgccaaggcgaacggatgagcacgatctcatgttgctaaagctggccaggcccgtagtgccggggccccgcgtccgggccctgcagcttccctaccgctgtgctcagcccggagaccagtgccaggttgctggctggggcaccacggccgcccggagagtgaagtacaacaagggcctgacctgctccagcatcactatcctgagccctaaagagtgtgaggtcttctaccctggcgtggtcaccaacaacatgatatgtgctggactggaccggggccaggacccttgccagagtgactctggaggccccctggtctgtgacgagaccctccaaggcatcctctcgtggggtgtttacccctgtggctctgcccagcatccagctgtctacacccagatctgcaaatacatgtcctggatcaataaagtcatacgctccaactgatccagatgctacgctccagctgatccagatgttatgctcctgctgatccagatgcccagaggctccatcgtccatcctcttcctccccagtcggctgaactctccccttgtctgcactgttcaaacctctgccgccctccacacctctaaacatctcccctctcacctcattcccccacctatccccattctctgcctgtactgaagctgaaatgcaggaagtggtggcaaaggtttattccagagaagccaggaagccggtcatcacccagcctctgagagcagttactggggtcacccaacctgacttcctctgccactccccgctgtgtgactttgggcaagccaagtgccctctctgaacctcagtttcctcatctgcaaaatgggaacaatgacgtgcctacctcttagacatgttgtgaggagactatgatataacatgtgtatgtaaatcttaaaaaaaaaaaaaaaaaaaaaaaa

SEQ ID NO: 199 - DNA, 2026 bp, human
gaattccggtgccatggctgagtcacacctgctgcagtggctgctgctgctgctgcccacgctctgtggcccaggcactgctgcctggaccacctcatccttggcctgtgcccagggccctgagttctggtgccaaagcctggagcaagcattgcagtgcagagccctagggcattgcctacaggaagtctggggacatgtgggagccgatgacctatgccaagagtgtgaggacatcgtccacatccttaacaagatggccaaggaggccattttccaggacacgatgaggaagttcctggagcaggagtgcaacgtcctccccttgaagctgctcatgccccagtgcaaccaagtgcttgacgactacttccccctggtcatcgactacttccagaaccagactgactcaaacggcatctgtatgcacctgggcctgtgcaaatcccggcagccagagccagagcaggagccagggatgtcagaccccctgcccaaacctctgcgggaccctctgccagaccctctgctggacaagctcgtcctccctgtgctgcccggggccctccaggcgaggcctgggcctcacacacaggatctctccgagcagcaattccccattcctctcccctattgctggctctgcagggctctgatcaagcggatccaagccatgattcccaagggtgcgctagctgtggcagtggcccaggtgtgccgcgtggtacctctggtggcgggcggcatctgccagtgcctggctgagcgctactccgtcatcctgctcgacacgctgctgggccgcatgctgccccagctggtctgccgcctcgtcctccggtgctccatggatgacagcgctggcccaaggtcgccgacaggagaatggctgccgcgagactctgagtgccacctctgcatgtccgtgaccacccaggccgggaacagcagcgagcaggccataccacaggcaatgctccaggcctgtgttggctcctggctggacagggaaaagtgcaagcaatttgtggagcagcacacgccccagctgctgaccctggtgcccaggggctgggatgcccacaccacctgccaggccctcggggtgtgtgggaccatgtccagccctctccagtgtatccacagccccgacctttgatgagaactcagctgtccagctgcaaaggaaaagccaagtgagacgggctctgggaccatggtgaccaggctcttcccctgctccctggccctcgccagctgccaggctgaaaagaagcctcagctcccacaccgccctcctcacctcccttcctcggcagtcacttccactggtggaccacgggcccccagccctgtgtcggccttgtctgtctcagctcaaccacagtctgacaccagagcccacttccatcctctctggtgtgaggcacagcgagggcagcatctggaggagctctgcagcctccacacctaccacgacctcccagggctgggctcaggaaaaaccagccactgctttacaggacagggggttgaagctgagccccgcctcacacccacccccatgcactcaaagattggattttacagctacttgcaattcaaaattcagaagaataaaaaatgggaacatacagaactctaaaagatagacatcagaaattgttaagttaagctttttcaaaaaatcagcaattccccagcgtagtcaagggtggacactgcacgctctggcatgatgggatggcgaccgggcaagctttcttcctcgagatgctctgctgcttgagagctattgctttgttaagatataaaaaggggtttctttttgtctttctgtaaggtggacttccagattttgattgaaagtcctagggtgattctatttctgctgtgatttatctgctgaaagctcagctggggttgtgcaagctagggacccattcctgtgtaatacaatgtctgcaccaatgctaataaagtcctattctcttttaaaaaaaaaaaaaaaaaaaaaacggaattc

SEQ ID NO: 200 - DNA, 5233 bp, human
  misc_feature (355)..(355): n is a, c, g, or t
tgccccgcgcgctctgctacgggcccgctgggcctccgcgccttctagcttccggagcccactttgatcggggccataatacctattgagatcccctcttctgtcttgtaccttcgccactggcatcggatttgcagaagcctgcgtgggatcagaggaccgccctccccacaacaaccggcccctgcatcttagcagccgttggaagccccagctcttttaccgccaagttcatccttgggagacagaagacgcgtgatctcctctccgctgctcttggggtctccttgcagccctggccaggcggattcatcctcaggacctaaagttgcccaaggagctcctgctctgccanaggagggtggaaagggcggtgggaggcgtgtgcctgagtgggctctactgccttgttccatattattttgtgcacattttccctggcactctgggttgctagccccgccgggcactgggcctcagacactgcgcggttccctcggagcagcaagctaaagaaagcccccagtgccggcgaggaaggaggcggcggggaaagatgcgcggcgttggctggcagatgctgtccctgtcgctggggttagtgctggcgatcctgaacaaggtggcaccgcaggcgtgcccggcgcagtgctcttgctcgggcagcacagtggactgtcacgggctggcgctgcgcagcgtgcccaggaatatcccccgcaacaccgagagactggatttaaatggaaataacatcacaagaattacgaagacagattttgctggtcttagacatctaagagttcttcagcttatggagaataagattagcaccattgaaagaggagcattccaggatcttaaagaactagagagactgcgtttaaacagaaatcaccttcagctgtttcctgagttgctgtttcttgggactgcgaagctatacaggcttgatctcagtgaaaaccaaattcaggcaatcccaaggaaagctttccgtggggcagttgacataaaaaatttgcaactggattacaaccagatcagctgtattgaagatggggcattcagggctctccgggacctggaagtgctcactctcaacaataacaacattactagactttctgtggcaagtttcaaccatatgcctaaacttaggacttttcgactgcattcaaacaacctgtattgtgactgccacctggcctggctctccgactggcttcgccaaaggcctcgggttggtctgtacactcagtgtatgggcccctcccacctgagaggccataatgtagccgaggttcaaaaacgagaatttgtctgcagtggtcaccagtcatttatggctccttcttgtagtgttttgcactgccctgccgcctgtacctgtagcaacaatatcgtagactgtcgtgggaaaggtctcactgagatccccacaaatcttccagagaccatcacagaaatacgtttggaacagaacacaatcaaagtcatccctcctggagctttctcaccatataaaaagcttagacgaattgacctgagcaataatcagatctctgaacttgcaccagatgctttccaaggactacgctctctgaattcacttgtcctctatggaaataaaatcacagaactccccaaaagtttatttgaaggactgttttccttacagctcctattattgaatgccaacaagataaactgccttcgggtagatgcttttcaggatctccacaacttgaaccttctctccctatatgacaacaagcttcagaccatcgccaaggggaccttttcacctcttcgggccattcaaactatgcatttggcccagaacccctttatttgtgactgccatctcaagtggctagcggattatctccataccaacccgattgagaccagtggtgcccgttgcaccagcccccgccgcctggcaaacaaaagaattggacagatcaaaagcaagaaattccgttgttcaggtacagaagattatcgatcaaaattaagtggagactgctttgcggatctggcttgccctgaaaagtgtcgctgtgaaggaaccacagtagattgctctaatcaaaagctcaacaaaatcccggagcacattccccagtacactgcagagttgcgtctcaataataatgaatttaccgtgttggaagccacaggaatctttaagaaacttcctcaattacgtaaaataaactttagcaacaataagatcacagatattgaggagggagcatttgaaggagcatctggtgtaaatgaaatacttcttacgagtaatcgtttggaaaatgtgcagcataagatgttcaagggattggaaaagcctcaaaacttgatgttgagaagcaatcgaataacctgtgtggggaatgacagtttcataggactcagttctgtgcgtatgctttctttgtatgataatcaaattactacagttgcaccaggggcatttgatactctccattctttatctactctaaacctcttggccaatccttttaactgtaactgctacctggcttggttgggagagtggctgagaaagaagagaattgtcacgggaaatcctagatgtcaaaaaccatacttcctgaaagaaatacccatccaggatgtggccattcaggacttcacttgtgatgacggaaatgatgacaatagttgctccccactttctcgctgtcctactgaatgtacttgcttggatacagtcgtccgatgtagcaacaagggtttgaaggtcttgccgaaaggtattccaagagatgtcacagagttgtatctggatggaaaccaatttacactggttcccaaggaactctccaactacaaacatttaacacttatagacttaagtaacaacagaataagcacgctttctaatcagagcttcagcaacatgacccagctcctcaccttaattcttagttacaaccgtctgagatgtattcctcctcgcacctttgatggattaaagtctcttcgattactttctctacatggaaatgacatttctgttgtgcctgaaggtgctttcaatgatctttctgcattatcacatctagcaattggagccaaccctctttactgtgattgtaacatgcagtggttatccgactgggtgaagtcggaatataaggagcctggaattgctcgttgtgctggtcctggagaaatggcagataaacttttactcacaactccctccaaaaaatttacctgtcaaggtcctgtggatgtcaatattctagctaagtgtaacccctgcctatcaaatccgtgtaaaaatgatggcacatgtaatagtgatccagttgacttttaccgatgcacctgtccatatggtttcaaggggcaggactgtgatgtcccaattcatgcctgcatcagtaacccatgtaaacatggaggaacttgccacttaaaggaaggagaagaagatggattctggtgtatttgtgctgatggatttgaaggagaaaattgtgaagtcaacgttgatgattgtgaagataatgactgtgaaaataattctacatgtgtcgatggcattaataactacacatgcctttgcccacctgagtatacaggtgagttgtgtgaggagaagctggacttctgtgcccaggacctgaacccctgccagcacgattcaaagtgcatcctaactccaaagggattcaaatgtgactgcacaccagggtacgtaggtgaacactgcgacatcgattttgacgactgccaagacaacaagtgtaaaaacggagcccactgcacagatgcagtgaacggctatacgtgcatatgccccgaaggttacagtggcttgttctgtgagttttctccacccatggtcctccctcgtaccagcccctgtgataattttgattgtcagaatggagctcagtgtatcgtcagaataaatgagccaatatgtcagtgtttgcctggctatcagggagaaaagtgtgaaaaattggttagtgtgaattttataaacaaagagtcttatcttcagattccttcagccaaggttcggcctcagacgaacataacacttcagattgccacagatgaagacagcggaatcctcctgtataagggtgacaaagaccatatcgcggtagaactctatcgggggcgtgttcgtgccagctatgacaccggctctcatccagcttctgccatttacagtgtggagacaatcaatgatggaaacttccacattgtggaactacttgccttggatcagagtctctctttgtccgtggatggtgggaaccccaaaatcatcactaacttgtcaaagcagtccactctgaattttgactctccactctatgtaggaggcatgccagggaagagtaacgtggcatctctgcgccaggcccctgggcagaacggaaccagcttccacggctgcatccggaacctttacatcaacagtgagctgcaggacttccagaaggtgccgatgcaaacaggcattttgcctggctgtgagccatgccacaagaaggtgtgtgcccatggcacatgccagcccagcagccaggcaggcttcacctgcgagtgccaggaaggatggatggggcccctctgtgaccaacggaccaatgacccttgccttggaaataaatgcgtacatggcacctgcttgcccatcaatgcgttctcctacagctgtaagtgcttggagggccatggaggtgtcctctgtgatgaagaggaggatctgtttaacccatgccaggcgatcaagtgcaagcatgggaagtgcaggctttcaggtctggggcagccctactgtgaatgcagcagtggatacacgggggacagctgtgatcgagaaatctcttgtcgaggggaaaggataagagattattaccaaaagcagcagggctatgctgcttgccaaacaaccaagaaggtgtcccgattagagtgcagaggtgggtgtgcaggagggcagtgctgtggaccgctgaggagcaagcggcggaaatactctttcgaatgcactgacggctcctcctttgtggacgaggttgagaaagtggtgaagtgcggctgtacgaggtgtgtgtcctaaacacactcccggcagctctgtctttggaaaaggttgtatacttcttgaccatgtgggactaatgaatgcttcatagtggaaatatttgaaatatattgtaaaatacagaac

SEQ ID NO: 201 - DNA, 760 bp, human
gccaggagttgtgagtttccaagccccagctcactctgaccacttctctgcctgcccagcatcatgaagggccttgcagctgccctccttgtcctcgtctgcaccatggccctctgctcctgtgcacaagttggtaccaacaaagagctctgctgcctcgtctatacctcctggcagattccacaaaagttcatagttgactattctgaaaccagcccccagtgccccaagccaggtgtcatcctcctaaccaagagaggccggcagatctgtgctgaccccaataagaagtgggtccagaaatacatcagcgacctgaagctgaatgcctgaggggcctggaagctgcgagggcccagtgaacttggtgggcccaggagggaacaggagcctgagccagggcaatggccctgccaccctggaggccacctcttctaagagtcccatctgctatgcccagccacattaactaactttaatcttagtttatgcatcatatttcattttgaaattgatttctattgttgagctgcattatgaaattagtattttctctgacatctcatgacattgtctttatcatcctttcccctttcccttcaactcttcgtacattcaatgcatggatcaatcagtgtgattagctttctcagcagacattgtgccatatgtatcaaatgacaaatctttattgaatggttttgctcagcaccaccttttaatatattggcagtacttattatataaaaggtaaaccagc

SEQ ID NO: 202 - DNA, 1939 bp, human
cgacgcggaccgcggcggcgtcctccctcgccctcgcttcacctcgcgggctccgaatgcggggagctcggatgtccggtttcctgtgaggcttttacctgacacccgccgcctttccccggcactggctgggagggcgccctgcaaagttgggaacgcggagccccggacccgctcccgccgcctccggctcgcccagggggggtcgccgggaggagcccgggggagagggaccaggaggggcccgcggcctcgcaggggcgcccgcgcccccacccctgcccccgccagcggaccggtcccccacccccggtccttccaccatgcacttgctgggcttcttctctgtggcgtgttctctgctcgccgctgcgctgctcccgggtcctcgcgaggcgcccgccgccgccgccgccttcgagtccggactcgacctctcggacgcggagcccgacgcgggcgaggccacggcttatgcaagcaaagatctggaggagcagttacggtctgtgtccagtgtagatgaactcatgactgtactctacccagaatattggaaaatgtacaagtgtcagctaaggaaaggaggctggcaacataacagagaacaggccaacctcaactcaaggacagaagagactattaaatttgctgcagcacattataatacagagatcttgaaaagtattgataatgagtggagaaagactcaatgcatgccacgggaggtgtgtatagatgtggggaaggagtttggagtcgcgacaaacaccttctttaaacctccatgtgtgtccgtctacagatgtgggggttgctgcaatagtgaggggctgcagtgcatgaacaccagcacgagctacctcagcaagacgttatttgaaattacagtgcctctctctcaaggccccaaaccagtaacaatcagttttgccaatcacacttcctgccgatgcatgtctaaactggatgtttacagacaagttcattccattattagacgttccctgccagcaacactaccacagtgtcaggcagcgaacaagacctgccccaccaattacatgtggaataatcacatctgcagatgcctggctcaggaagattttatgttttcctcggatgctggagatgactcaacagatggattccatgacatctgtggaccaaacaaggagctggatgaagagacctgtcagtgtgtctgcagagcggggcttcggcctgccagctgtggaccccacaaagaactagacagaaactcatgccagtgtgtctgtaaaaacaaactcttccccagccaatgtggggccaaccgagaatttgatgaaaacacatgccagtgtgtatgtaaaagaacctgccccagaaatcaacccctaaatcctggaaaatgtgcctgtgaatgtacagaaagtccacagaaatgcttgttaaaaggaaagaagttccaccaccaaacatgcagctgttacagacggccatgtacgaaccgccagaaggcttgtgagccaggattttcatatagtgaagaagtgtgtcgttgtgtcccttcatattggaaaagaccacaaatgagctaagattgtactgttttccagttcatcgattttctattatggaaaactgtgttgccacagtagaactgtctgtgaacagagagacccttgtgggtccatgctaacaaagacaaaagtctgtctttcctgaaccatgtggataactttacagaaatggactggagctcatctgcaaaaggcctcttgtaaagactggttttctgccaatgaccaaacagccaagattttcctcttgtgatttctttaaaagaatgactatatattttatttccactaaaaatattgtttctgcattcatttttatagcaacaacaattggtaaaactcactgtgatcaatatttttatatcatgcaaaat

SEQ ID NO: 203 - DNA, 5786 bp, human
gccgcccctgagcagcctcgccttcgcctcccgcgtttcctgccgtccgccctcccccggccgagctccaggggctgccgcctagcagctcccggcgggagagcggttcagagcgcgcacgggggcgggcggaggcggcccggtgcggggcggccgcgctggagagaggcgcgcgcggagacgccggcccccctctccgcgtttgctcgcttgctccccgcctcccgcactccgctcgctcccaccccttcccggcgtgattgatccgtcacgggcgccgccgctgccgccgccgccgcggccgttctgagccgagccggaaccctagcccgagacggagccggggcccgggccggcgccattgcgcgggcgccgcgggaagaccttggcgcggggcggcgggccgggccaggccatgcgggccgagtgagccggcgcccgcagcccgcggcgcggcatggcttccccgcggagctccgggcagcccgggccgccgccgccgccgccaccgccgcccgcgcgcctgctactgctactgctgctgccgctgctgctgcctctggcgcccggggcctggggctgggcgcggggcgccccccggccgccgcccagcagcccgccgctctccatcatgggcctcatgccgctcaccaaggaggtggccaagggcagcatcgggcgcggtgtgctccccgccgtggaactggccatcgagcagatccgcaacgagtcactcctgcgcccctacttcctcgacctgcggctctatgacacggagtgcgacaacgcaaaagggttgaaagccttctacgatgcaataaaatacgggccgaaccacttgatggtgtttggaggcgtctgtccatccgtcacatccatcattgcagagtccctccaaggctggaatctggtgcagctttcttttgctgcaaccacgcctgttctagccgataagaaaaaatacccttatttctttcggaccgtcccatcagacaatgcggtgaatccagccattctgaagttgctcaagcactaccagtggaagcgcgtgggcacgctgacgcaagacgttcagaggttctctgaggtgcggaatgacctgactggagttctgtatggcgaggacattgagatttcagacaccgagagcttctccaacgatccctgtaccagtgtcaaaaagctgaaggggaatgatgtgcggatcatccttggccagtttgaccagaatatggcagcaaaagtgttctgttgtgcatacgaggagaacatgtatggtagtaaatatcagtggatcattccgggctggtacgagccttcttggtgggagcaggtgcacacggaagccaactcatcccgctgcctccggaagaatctgcttgctgccatggagggctacattggcgtggatttcgagcccctgagctccaagcagatcaagaccatctcaggaaagactccacagcagtatgagagagagtacaacaacaagcggtcaggcgtggggcccagcaagttccacgggtacgcctacgatggcatctgggtcatcgccaagacactgcagagggccatggagacactgcatgccagcagccggcaccagcggatccaggacttcaactacacggaccacacgctgggcaggatcatcctcaatgccatgaacgagaccaacttcttcggggtcacgggtcaagttgtattccggaatggggagagaatggggaccattaaatttactcaatttcaagacagcagggaggtgaaggtgggagagtacaacgctgtggccgacacactggagatcatcaatgacaccatcaggttccaaggatccgaaccaccaaaagacaagaccatcatcctggagcagctgcggaagatctccctacctctctacagcatcctctctgccctcaccatcctcgggatgatcatggccagtgcttttctcttcttcaacatcaagaaccggaatcagaagctcataaagatgtcgagtccatacatgaacaaccttatcatccttggagggatgctctcctatgcttccatatttctctttggccttgatggatcctttgtctctgaaaagacctttgaaacactttgcaccgtcaggacctggattctcaccgtgggctacacgaccgcttttggggccatgtttgcaaagacctggagagtccacgccatcttcaaaaatgtgaaaatgaagaagaagatcatcaaggaccagaaactgcttgtgatcgtggggggcatgctgctgatcgacctgtgtatcctgatctgctggcaggctgtggaccccctgcgaaggacagtggagaagtacagcatggagccggacccagcaggacgggatatctccatccgccctctcctggagcactgtgagaacacccatatgaccatctggcttggcatcgtctatgcctacaagggacttctcatgttgttcggttgtttcttagcttgggagacccgcaacgtcagcatccccgcactcaacgacagcaagtacatcgggatgagtgtctacaacgtggggatcatgtgcatcatcggggccgctgtctccttcctgacccgggaccagcccaatgtgcagttctgcatcgtggctctggtcatcatcttctgcagcaccatcaccctctgcctggtattcgtgccgaagctcatcaccctgagaacaaacccagatgcagcaacgcagaacaggcgattccagttcactcagaatcagaagaaagaagattctaaaacgtccacctcggtcaccagtgtgaaccaagccagcacatcccgcctggagggcctacagtcagaaaaccatcgcctgcgaatgaagatcacagagctggataaagacttggaagaggtcaccatgcagctgcaggacacaccagaaaagaccacctacattaaacagaaccactaccaagagctcaatgacatcctcaacctgggaaacttcactgagagcacagatggaggaaaggccattttaaaaaatcacctcgatcaaaatccccagctacagtggaacacaacagagccctctcgaacatgcaaagatcctatagaagatataaactctccagaacacatccagcgtcggctgtccctccagctccccatcctccaccacgcctacctcccatccatcggaggcgtggacgccagctgtgtcagcccctgcgtcagccccaccgccagcccccgccacagacatgtgccaccctccttccgagtcatggtctcgggcctgtaagggtgggaggcctgggcccggggcctcccccgtgacagaaccacactgggcagaggggtctgctgcagaaacactgtcggctctggctgcggagaagctgggcaccatggctggcctctcaggaccactcggatggcactcaggtggacaggacggggcagggggagacttggcacctgacctcgagccttatttgtgaagtccttatttcttcacaaagaagaggaacggaaatgggacgtcttccttaacatctgcaaacaaggaggcgctgggatatcaaacttgcaaaaaaaaaaaaaaaacaaaacaaaaaaaaaaactagacaaggagagaggcactagaactccagctggaagtcacggagtggctcgagcagccttgggaagaggcaaggagcttctgaagaaactgcctctgcacacacatcactggctgtgacccctcaggctagcccttctccactctgggggaggaggtgggaagggccaccaggcccccagctgccaggccagctgaccccagccttcctggaacagggagtctgcaggagcgcagacaggcacagccctggagcaggcaggccgagggctgcggcactggagcaggctgacttacatgctccacatgggacctgtgtcacccaatgagatgtttgttactctggtaaatgccacacgttaacacaataacacccattcctgggaccgtggggatttagggcacgtcactgcagacacgctctgcagcattcaccgacagtctgtcatgcacccaccacgttggccacgtccttgtgttcctatcggatgctcccagtaaccagggggaccacccgagctaatcatggaatgtctgttcccagcaaacacgataaagaaagattgtgcactttaacctctctcatcagggcccaagggctggctgggattttttttttttttttttcccactaactttgtttctgaccaaagtgaattggaggcattctgctaaaagacatccccgtagacataggggagagagttgctggctgagggcttcccttggcttccagaaggcagccttccatccagacaagccagtgagctctccccttgggatcactggggtgatcagtcagcagattgattctcattcataagatcattcctccctttaaattgagcccctaagagcactggcctgggagtcagacagacctgggttcaagtcctcagtcccctgcccactccctacgtgactttgatcaggtcactagtgtctctctgagcctcagtttcccctctgtaacttggggttgaactaaaacacctgtcctgcctacctcacaaggtcactctgaggattgaaacttgatcttgtccaggaaagctttgtaccaaacagtgaagccgccctgatccgtgaggtatgagtatgactctgaccttcagccctccctacagccgggggtgtggcccagagaagcttccagcacagccctctacccagaacatccgggctggagggaggctcccagtgacttttctgacattcctagacaggttcattctttgctcaagaaaggcctgaatgacaatgtccaggatgtctgcacaactgagcagctcgctcactccctaaagaaacctattggcagcttcaacaggcaggcaataatctcttcccagaaccactgcagtcaggaataaactgttttctccaccaggctttgacaaaagggcccacaggaatcttaccaatgccaacatttcaaagcaccctatttcacgtagcatagctttctgctccccttccccaaagagaggttatggaggtactgtagcttttagggaaaaaaaaaatgttaacacatcacaggtcaagttgaagtcattctctgtttaggcactaaaaatcggtgttgtcactcactgtgtattaccagtatttacttgctttcttgatttcaccaaaaccaaatttaatttaaaggaccacattaatttttcaaagggaaagagacaattaattgtacataatgtatacacacacaaaaaaaaaaatacctgtagaaatattattccagcatagcaggaaaacaaacaaaagtattggactgtcggaggtgagcctgtgcgtctgtaaccctttgtgactcctgagcgtgcgctgtcttctaggttaactcacgaagtacattctctgtcttactgatactgtaggttcacccatttttttttaatttcctcgcaaataacaagacccacagaagtgactctagctacttaatggttctgttcttttatatgcagcaaacacaccgtccatttctgaagaggcttcggcctgaaggcattttccaatgatgttagtgcacaaaacgctttaaattagactggaactgccagaatcaaatgtaaatgaggaatttctcgtacccctactgcatggtatcgatttttaataaattgttgcaaatttgtttttatgaataaaaggaaaaaacctgtcgtcttt

SEQ ID NO: 204 - DNA, 3394 bp, human
ggatccccttatcaaagctgatgggggtcgctggggaccccccagccttttgctagagcctgcacggctgtgggagcttgaaaagaaacatgaaggtgggctggccaggtgagagctgctggcaggtgggcctggctgtggaggatagcccagctctgggagcaccgcgggtgggagccctccctgacgtggtgccggaggggacactactcaacatggtgttgagaaggatgcaccggccccgaagctgctcctaccagctgctgctggagcaccagcatccgagctgcatccaggggctgcgctggacaccactcaccaacagcgaggagtccctggatttcagcgagagcctggagcaggcctccacagagcgggtgctcagggctgggaggcagctgcatcagcatctactggccacctgcccaaacctcatccgagaccggaagtaccaccttaggctctatcggcagtgctgctctggccgggagctggtggatgggatcttggccctgggacttggggtccattcccggagccaagttgtgggaatctgccaggtgctgctggatgaaggtgccctctgccatgtgaaacacgactgggccttccaggaccgagatgcccaattctaccggttccccgggcccgagcccgagcccgtgggaactcatgagatggaggaggagttggccgaagctgtggccctgctctcccagcgggggcctgacgccctgctcactgtggcacttcgaaagcccccaggtcagcgcacggatgaagagctggacctcatctttgaggagctgctgcacatcaaggctgtggcccacctctccaactcggtgaagcgagaattagcggctgttctgctctttgaaccacacagcaaggcagggaccgtgttgttcagccagggggacaagggcacttcgtggtacattatctggaagggatctgtcaacgtggtgacccatggcaaggggctggtgaccaccctgcatgagggagatgattttggacagctggctctggtgaatgatgcaccccgggcagccaccatcatcctgcgagaatacaactgtcatttcctgcgtgtggacaagcaggacttcaaccgtatcatcaaggatgtggaggcaaagaccatgcggctggaagaacatggcaaagtggtgctggtgctggagagagcctctcagggcgccggcccttcccgacccccaaccccaggcaggaaccggtatacagtgatgtctggcactccagataagatcctagagcttctgttggaggccatgggactagattccagtgctcatgacccaaaagaaacattcctcagcgacttcctcctgacccacagggtcttcatgcccagcgcccaactctgcgctgcccttctgcaccacttccatgtggagcctgcgggtggcagcgagcaggagcgcagcacctacgtctgcaacaagaggcagcagatcttgcggctggtcagccagtgggtggccctgtatggctccatgctccacactgaccctgtggccaccagcttcctccacaaactctcagacctggtgggcagggacacccgactcagcaacctgctgagggagcagtggccagagaggcggcgatgccacaggttggagaatggctgtgggaatgcatctcctcagatgaaggcccggaacttgcctgtttggctccccaaccaggacgagccccttcctggcagcagctgtgccatccaagttggggataaagtcccctatgacatctgccggccagaccactcagtgttgaccctgcagctgcctgtgacagcctccgtgagagaggtgatggcagcgttggcccaggaggatggctggaccaaggggcaggtgctggtgaaggtcaattctgcaggtgatgccattggcctgcagccagatgcccgtggtgtggccacatctctggggctcaatgagcgtctctttgttgtcaacccacaggaagtgcatgagctgatcccacaccctgaccagctggggcccactgtgggctctgctgaggggctggacctggtgagtgccaaggacctggcaggccagctgacggaccacgactggagcctcttcaacagtatccaccaggtggagctgatccactatgtgctgggcccccagcatctgcgggatgtcaccaccgccaacctggagcgcttcatgcgccgcttcaatgagctgcagtactgggtggccaccgagctgtgtctctgccccgtgcccggcccccgggcccagctgctcaaaaagttcattaagctggcggcccacctcaaggagcagaagaatgtcaattccttctttgccgtcatgtttggcctcagcaactcgcccatcagccgcctagcccacacctgggagcggctgcctcacaaagtccggaagctgtactccgccctcgagaggctgctggatccctcatggaaccaccgggtataccgactggccctcgccaagctctcccctcctgtcatccccttcatgccccttcttctcaaagacatgaccttcattcatgagggaaaccacacactagtggagaatctcatcaactttgagaagatgagaatgatggccagagccgcgcggatgctgcaccactgccgaagccacaaccctgtgcctctctcaccactcagaagccgagtttcccacctccacgaggacagccaggtggcgaggatttccacatgctcggagcagtccctgagcacccggagtccagccagcacctgggcttatgtccagcagctgaaggtcattgacaaccagcgggaactctcccgcctgtcccgagagctggagccatgaggaggggctgggactggagctggagcaggcacttgcagccgggaaagccagggtgtgccgggccaagatactcacaggctggccacagctgggcaaggctctccgtggagtggactcgagtccctggagcaggcagtgtggaggcagccatcccctgtgatgactggcagctaaggaggacctcggagtggaccaaagccaggaataacgaatgaccaagggccaaggaagggaggacagagaggccccaggagtgggtggagagtggagtgcgctgggacgttgtgtgcaatagagaggtctccacaccagatgtcttccagattctgtgcctctggctttgttgtccagccaggcctgcagtttattttcacagtggacagagagagagagagaggctgcatgtgtgtaccgtgtgtggcaagggcagggccttggcctggggcaggggcccctgctttctttccacagctttcttccaacagcaggcagtggggctgcgggcctgaaaaaaaaaaaaaaaaaaaaaaaaa

SEQ ID NO: 205 - DNA, 412 bp, human
ttttttttttattccataggaagaaaatttatttcatgttgtgagtgcaaattttagtaacaattctgttgaagtcacttttctaggactctgtttccaaagcaattagttcagctattcaagatgaaacacattatttatcaagatgtgatattttgaaatgtcacaggagagaaacacatgacaaaaggcaacacatttgtttaatttcattagttacaagcgaacttctaggtaagtcatgattttcgatgtttataatatttctattaagatgtgcaggtctcaatgatagtgatgagtgggtatggctgtggagagattccaggtgagtccagcagggaccatctgtggggacccattaacgacacttcacaatcttaaaacaacaaagagcttttatttcatggtg

SEQ ID NO: 206 - DNA, 502 bp, human
ctcacaccttgcatttcacccctgcatcccatgcgccctgcagcctcacacagatcctgcacacacccagacagctggcgctcacacattcaccgttggcctgcctctgttcaccctccatggccctgctactggccctcagcctgctggttctctggacttccccagccccaactctgagtggcaccaatgatgctgaagactgctgcctgtctgtgacccagaaacccatccctgggtacatcgtgaggaacttccactaccttctcatcaaggatggctgcagggtgcctgctgtagtgttcaccacactgaggggccgccagctctgtgcacccccagaccagccctgggtagaacgcatcatccagagactgcagaggacctcagccaagatgaagcgccgcagcagttaacctatgaccgtgcagagggagccccgagtccgagtcaagcattgtgaattattactaactgggaacgaggacagaaggaaggacag

SEQ ID NO: 207 - DNA, 3176 bp, human
tgataacccaaggtattcacagcaagatacagtgagtcttaaagttaagcaccgtgcaattagctttgcttccttgggtttttgaaacatgcatctgtataaacctgcctgtgcagacatcccgagccccaagctgggtctgccaaaatccagtgaatcggctctaaaatgtagatggcacctagcagtgaccaagactcagcctcaggcggcctgcaaacctgtgaggcccagtggagcagccgaacagaaatatgtggaaaagtttctacgtgttcatggaatttcgttgcaggaaaccaccagagcagagacgggcatggcatacaggaatcttggaaaatcaggactcagagtttcttgcttgggtcttggaacatgggtgacatttggaggtcaaatttcagatgaggttgctgaacggctgatgaccatcgcctatgaaagtggtgttaacctctttgatactgccgaagtctatgctgctggaaaggctgaagtgattctggggagcatcatcaagaagaaaggctggaggaggtccagtctggtcataacaaccaaactctactggggtggaaaagctgaaacagaaagagggctgtcaagaaagcatattattgaaggattgaagggctccctccagaggctgcagctcgagtatgtggatgtggtctttgcaaatcgaccggacagtaacactcccatggaagaaattgtccgagccatgacacatgtgataaaccaaggcatggcgatgtactggggcacctcgagatggagtgctatggagatcatggaagcctattctgtagcaagacagttcaatatgatcccaccggtctgtgaacaagctgagtaccatcttttccagagagagaaagtggaggtccagctgccagagctctaccacaaaataggtgttggcgcaatgacatggtctccacttgcctgtggaatcatctcaggaaaatacggaaacggggtgcctgaaagttccagggcttcactgaagtgctaccagtggttgaaagaaagaattgtaagtgaagaagggagaaaacagcaaaacaagctaaaagacctttccccaattgcggagcgtctgggatgcacactacctcagctagctgttgcgtggtgcctgagaaatgaaggtgtgagttctgtgctcctgggatcatccactcctgaacaactcattgaaaaccttggtgccattcaggttctcccaaagatgacatcacatgtggtaaatgagattgataacatactgcgcaacaagccctacagcaagaaggactatagatcataaggcaatgcatgaaccacagaagctgcatggttaaaatagcggcctgtgcccagtacagaaaggtgttactaaccagtcttttgaatcacttagcagcttgctcgtcaacctctagtgtccctccctggattctttgaggtgtctgctgtcgctaccactgtgcacatctgaaaactcacaaccaagaaaatccattctattttcttatcttggactggagtcacctattcttgcattgctgtatacacctcatgcttatgcaatgggaagaatatgggggccagggggtgtggtactaccttcaggcatttggtaactcaaagaaggctgtacagatatattttttcaaaaagaacaaaatccacagatgcaatgtgagttgcgtaagaaacagagtagatagactaaattcagtgaaggaaaggaattgagagatttttcttagtaaatagattattgttaagtaaatagttattaaaaatatatctcactgcaaaaaaaaaaaaagcagtatcttcactcaaaagtcttgcttggaagaataagcagaaagaattttatatattttttttctattttcacattcatactaacaagttttgttccatttgttattcaataaaacaaaaatttctaggtatttgctttattacctttcaaatatttactgttgcttggccccaagaatggccttgtacaacttatccagaatgtctattaggattctaatgttatgtccacttacaagtagagacagtaaaaggatgaatacccaatctttagtgacaatgcagctgatttatgaaagagagggctacactgctatggaaacttagcttcaaagaaaatgcaatgtatctgcaattaggtgttcattttttactacattttattaaaacctgctttatactttcaactgcttgtaggcacaacttctgcaagtttaaatatttgagctttacaaataaacatacacatgctcagtttttttaagtaaacctgtaaaatacccaggaaggcaaatgttcattgtttaattagcactgggattttataatataatgtttggtatttttgaggcattgttaacatgaaagtcaaccactggctttgtgaaaaatgctatgtcactattcagaatatgctgggtaaattaacttgcctagtgaaaagcaaaatgttaaagaaagaacttctggttctataatcatattatatgcactaaactatatgcatgaaagttctttgcatggattaatggggcttacccttgttgcactcgaaatctgaggtgtatctagccctgccactattggctacttaccctcattaatatcccacttgagaaaaattgtgagactatactgtgtcaatatctgtaaaaagagagaaaacatgtttttttttttttgaagggggtggtgtgggagtggccctttaactcctatttggctatctgaggatgtacaaaattctcatttaattttctggtcagcaagttccccacacagaaatcactctgaggtttacagaagaactgtaatattattttaaaatgcgattttctgtcattagttctagatatgtacttcatggttaaattctaaatctgaaaatgctagtgggagatatcaagaaattttctttttgattactagtacctgtattctaacagagagtttgaattttttgcccgtgttatcagaatgatggaaattgatcattttcagttgttcattgtgtattcaatccagctgaactgctgtatgtatagaggagcttgaggtgctgtctaatgggaaatgtgatttgattgatttatttgcttagagtaataaaagcattttgtgcattcaatctt

SEQ ID NO: 208 - DNA, 2084 bp, human
ggaactgcaaccatggtgcccagcttcctctccctgagcttctcctccttgggcctgtgggcttctgggctgatcttggtcttaggctttctcaagctcatccacctgctgctgcggaggcgaacgttggctaaggctatggacaaattcccagggcctcccacccactggctttttggacatgccctcgagatccaggagacggggagcctggacaaagtggtgtcctgggcccaccagttcccgtatgcccacccactctggttcggacagttcattggcttcctgaacatctatgagcctgactatgccaaagctgtgtacagccgtggggaccctaaggcccctgatgtgtatgacttcttcctccagtggattgggagaggcctgctggttcttgaggggcccaagtggttgcagcaccgcaagctgctcacacctggctttcattatgatgtgctgaagccctatgtggccgtgttcactgagtctacacgtatcatgctggacaagtgggaagagaaagctcgggagggtaagtcctttgacatcttctgcgatgtgggtcacatggcgctgaacacactcatgaagtgcacctttggaagaggagacaccggcctgggccacagggacagcagctactaccttgcagtcagcgatctcactctgttgatgcagcagcgccttgtgtccttccagtaccataatgacttcatctactggctcaccccacatggccgccgcttcctgcgggcctgccaggtggcccatgaccatacagaccaggtcatcagggagcggaaggcagccctgcaggatgagaaggtgcggaagaagatccagaaccggaggcacctggacttcctggacattctcctgggtgcccgggatgaagatgacatcaaactgtcagatgcagacctccgggctgaagtggacacattcatgtttgaaggccatgacaccaccaccagtggtatctcctggtttctctactgcatggccctgtaccctgagcaccagcatcgttgtagagaggaggtccgcgagatcctaggggaccaggacttcttccagtgggatgatctgggcaaaatgacttatctgaccatgtgcatcaaggagagcttccgcctctacccacctgtgccccaggtgtaccgccagctcagcaagcctgtcacctttgtggatggccggtctctacctgcaggaagcctgatctctatgcatatctatgccctccataggaacagtgctgtatggcccgaccctgaggtctttgactctctgcgcttttccactgagaatgcatccaaacgccatccctttgcctttatgcccttctctgctgggcccaggaactgcattgggcagcagtttgccatgagtgagatgaaggtggtcacagccatgtgcttgctccgctttgagttctctctggacccctcacggctgcccatcaagatgccccagcttgtcctgcgctccaagaatggctttcacctccacctgaagccactgggccctgggtctgggaagtagctctgatgagaatggggtcccagatggctcaggctgtgacctccctgggcaccaccctccccaggctgggtgtggaggagttggggccccctgccttcaggaggcttgtagtttagaagggaagtaggcattaccatagacgactcctagaggacagtgctatgtaaaaatgtgtgtctataaatgtttatcatgcatgtattctagagctcattcatttattcaacaaacatttggtgagcacctatttcggttcgagaaacttcatttatctcctataattggcaaacttaaaaatgcagcagaaacttacattccaaccttagagactcatagtgagcacaaggaaagttttgccctgagattcatggttatggctgggtaccaccaaatagaagaatggcttaggggagtgccccttcactgagatgtgtttctttgttgaactttgtgtgtgtgtgtttagaatataacagacataagaaaaaattacctaaatgaagactgtacaaaataataaataattctgaagcaga

SEQ ID NO: 209 - DNA, 1096 bp, human
tcctatctgccacacatccagcgtgaggtccctccagctacaaggtgggcaccatggcggagaagtttgactgccactactgcagggatcccttgcaggggaagaagtatgtgcaaaaggatggccaccactgctgcctgaaatgctttgacaagttctgtgccaacacctgtgtggaatgccgcaagcccatcggtgcggactccaaggaggtgcactataagaaccgcttctggcatgacacctgcttccgctgtgccaagtgccttcaccccttggccaatgagacctttgtggccaaggacaacaagatcctgtgcaacaagtgcaccactcgggaggactcccccaagtgcaaggggtgcttcaaggccattgtggcaggagatcaaaacgtggagtacaaggggaccgtctggcacaaagactgcttcacctgtagtaactgcaagcaagtcatcgggactggaagcttcttccctaaaggggaggacttctactgcgtgacttgccatgagaccaagtttgccaagcattgcgtgaagtgcaacaaggccatcacatctggaggaatcacttaccaggatcagccctggcatgccgattgctttgtgtgtgttacctgctctaagaagctggctgggcagcgtttcaccgctgtggaggaccagtattactgcgtggattgctacaagaactttgtggccaagaagtgtgctggatgcaagaaccccatcactgggaaaaggactgtgtcaagagtgagccgcccagtctctaaagctaggaagcccccagtgtgccacgggaaacgcttgcctctcaccctgtttcccagcgccaacctccggggcaggcatccgggtggagagaggacttgtccctcgtgggtggtggttctttatagaaaaaatcgaagcttagcagctcctcgtggcccgggtttggtaaaggctccagtgtggtggcctatgaaggacaatcctggcacgactactgcttccactgcaaaaaatgctccgtgaatctggccaacaagcgctttgttttccaccaggagcaagtgtattgtcccgactgtgccaaaaagctgtaa

SEQ ID NO: 210 - DNA, 910 bp, human
ttcgatatcgagctcctccaacagctctgacctgggcagccttcctgagaaaatgcagccattcctcctcctgttggcctttcttctgacccctggggctgggacagaggagatcatcgggggccatgaggccaagccccactcccgcccctacatggcctttgttcagtttctgcaagagaagagtcggaagaggtgtggcggcatcctagtgagaaaggactttgtgctgacagctgctcactgccagggaagctccataaatgtcaccttgggggcccacaatatcaaggaacaggagcggacccagcagtttatccctgtgaaaagacccatcccccatccagcctataatcctaagaacttctccaacgacatcatgctactgcagctggagagaaaggccaagtggaccacagctgtgcggcctctcaggctacctagcagcaaggcccaggtgaagccagggcagctgtgcagtgtggctggctggggttatgtctcaatgagcactttagcaaccacactgcaggaagtgttgctgacagtgcagaaggactgccagtgtgaacgtctcttccatggcaattacagcagagccactgagatttgtgtgggggatccaaagaagacacagaccggtttcaagggggactccggggggcccctcgtgtgtaaggacgtagcccaaggtattctctcctatggaaataaaaaagggacacctccaggagtctacatcaaggtctcacacttcctgccctggataaagagaacaatgaagcgcctctaacagcaggcatgagactaaccttcctctgggcctgaccatctctgggacagaggcaagaatccccaagggtgggagtcggggttgcaggactgtaataaatggatcgagcacgatatc

SEQ ID NO: 211 - DNA, 3060 bp, human
gaggcaattgaggcgcccatttcagaagagttacagccgtgaaaattactcagcagtgcagttggctgagaagaggaaaaaagaatgagagcgctggctgtgctgtctgtcacgctggttatggcctgcacagaagccttcttccccttcatctcgagagggaaagaactcctttggggaaagcctgaggagtctcgtgtctctagcgtcttggaggaaagcaagcgcctggtggacaccgccatgtacgccacgatgcagagaaacctcaagaaaagaggaatcctttctggagctcagcttctgtctttttccaaacttcctgagccaacaagcggagtgattgcccgagcagcagagataatggaaacatcaatacaagcgatgaaaagaaaagtcaacctgaaaactcaacaatcacagcatccaacggatgctttatcagaagatctgctgagcatcattgcaaacatgtctggatgtctcccttacatgctgcccccaaaatgcccaaacacttgcctggcgaacaaatacaggcccatcacaggagcttgcaacaacagagaccaccccagatggggcgcctccaacacggccctggcacgatggctccctccagtctatgaggacggcttcagtcagccccgaggctggaaccccggcttcttgtacaacgggttcccactgcccccggtccgggaggtgacaagacatgtcattcaagtttcaaatgaggttgtcacagatgatgaccgctattctgacctcctgatggcatggggacaatacatcgaccacgacatcgcgttcacaccacagagcaccagcaaagctgccttcgggggagggtctgactgccagatgacttgtgagaaccaaaacccatgttttcccatacaactcccggaggaggcccggccggccgcgggcaccgcctgtctgcccttctaccgctcttcggccgcctgcggcaccggggaccaaggcgcgctctttgggaacctgtccacggccaacccgaggcagcagatgaacgggttgacctcgttcctggacgcgtccaccgtgtatggcagctccccggccctagagaggcagctgcggaactggaccagtgccgaagggctgctccgcgtccacggccgcctccgggactccggccgcgcctacctgcccttcgtgccgccacgcgcgcctgcggcctgtgcgcccgagcccggcaaccccggagagacccgcgggccctgcttcctggccggagacggccgcgccagcgaggtcccctccctgacggcactgcacacgctgtggctgcgcgagcacaaccgcctggccgcggcgctcaaggccctcaatgcgcactggagcgcggacgccgtgtaccaggaggcgcgcaaggtcgtgggcgctctgcaccagatcatcaccctgagggattacatccccaggatcctgggacccgaggccttccagcagtacgtgggtccctatgaaggctatgactccaccgccaaccccactgtgtccaacgtgttctccacagccgccttccgcttcggccatgccacgatccacccgctggtgaggaggctggacgccagcttccaggagcaccccgacctgcccgggctgtggctgcaccaggctttcttcagcccatggacattactccgtggaggtggtttggacccactaatacgaggccttcttgcaagaccagccaaactgcaggtgcaggatcagctgatgaacgaggagctgacggaaaggctctttgtgctgtccaattccagcaccttggatctggcgtccatcaacctgcagaggggccgggaccacgggctgccaggttacaatgagtggagggagttctgcggcctgcctcgcctggagacccccgctgacctgagcacagccatcgccagcaggagcgtggccgacaagatcctggacttgtacaagcatcctgacaacatcgatgtctggctgggaggcttagctgaaaacttcctccccagggctcggacagggcccctgtttgcctgtctcattgggaagcagatgaaggctctgcgggacggtgactggttttggtgggagaacagccacgtcttcacggatgcacagaggcgtgagctggagaagcactccctgtctcgggtcatctgtgacaacactggcctcaccagggtgcccatggatgccttccaagtcggcaaattccccgaagactttgagtcttgtgacagcatcactggcatgaacctggaggcctggagggaaacctttcctcaagacgacaagtgtggcttcccagagagcgtggagaatggggactttgtgcactgtgaggagtctgggaggcgcgtgctggtgtattcctgccggcacgggtatgagctccaaggccgggagcagctcacttgcacccaggaaggatgggatttccagcctcccctctgcaaagatgtgaacgagtgtgcagacggtgcccaccccccctgccacgcctctgcgaggtgcagaaacaccaaaggcggcttccagtgtctctgcgcggacccctacgagttaggagacgatgggagaacctgcgtagactccgggaggctccctcgggtgacttggatctccatgtcgctggctgctctgctgatcggaggcttcgcaggtctcacctcgacggtgatttgcaggtggacacgcactggcactaaatccacactgcccatctcggagacaggcggaggaactcccgagctgagatgcggaaagcaccaggccgtagggacctcaccgcagcgggccgcagctcaggactcggagcaggagagtgctgggatggaaggccgggatactcacaggctgccgagagccctctgagggcaaagtggcaggacactgcagaacagcttcatgttcccaaaatcaccgtacgactcttttccaaacacaggcaaatcggaaatcagcaggacgactgttttcccaacacgggtaaatctagtaccatgtcgtagttactctcaggcatggatgaataaatgttatagctgc

SEQ ID NO: 212 - DNA, 554 bp, human
cagggtgtccccgccgccctcagctcgaagtcagccaccatggaggcgcaggcacaaggtttgttggagactgaaccgttgcaaggaacagacgaagatgcagtagccagtgctgacttctctagcatgctctctgaggaggaaaaggaagagttaaaagcagagttagttcagctagaagacgaaattacaacactacgacaagttttgtcagcgaaagaaaggcatctagttgagataaaacaaaaactcggcatgaacctgatgaatgaattaaaacagaacttcagcaaaagctggcatgacatgcagactaccactgcctacaagaaaacacatgaaaccctgagtcacgcagggcaaaaggcaactgcagctttcagcaacgttggaacggccatcagcaagaagttcggagacatgagacgaaagtaggcggtacgaaccctaatggaggcagttttgaggaggtcctcagctccacggcccatgccagtgcccagagcttggcaggaggctcccggcggaccaaggaggaggagctgcagtgctaa

SEQ ID NO: 213 - DNA, 322 bp, human
gtcagctcagcctccaaaggagccagcctctccccagttcctgaaatcctgagtgttgcctgccagtcgccatgagaacttcctaccttctgctgtttactctctgcttacttttgtctgagatggcctcaggtggtaactttctcacaggccttggccacagatctgatcattacaattgcgtcagcagtggagggcaatgtctctattctgcctgcccgatctttaccaaaattcaaggcacctgttacagagggaaggccaagtgctgcaagtgagctgggagtgaccagaagaaatgacgcagaagtgaaatgaactt

SEQ ID NO: 214 - DNA, 2633 bp, human
ggattctctctccaacccaagtgcctccagctgacctctggctcctgtcctctggctccacctgcaccgccctgctcttcctaaggggccaggaagcccccagaagctctaccatcgacgtgggtggtggcacccggctcaccctgagagcagaggccgtgcagggggctcagttctgagccccagccggcccaccatggcacggcggttccaggaggagctggccgccttcctcttcgagtatgacaccccccgcatggtgctggtgcgtaataagaaggtgggcgttatcttccgactgatccagctggtggtcctggtctacgtcatcgggtgggtgtttctctatgagaagggctaccagacctcgagcggcctcatcagcagtgtctctgtgaaactcaagggcctggccgtgacccagctccctggcctcggcccccaggtctgggatgtggctgactacgtcttcccagcccagggggacaactccttcgtggtcatgaccaatttcatcgtgaccccgaagcagactcaaggctactgcgcagagcacccagaagggggcatatgcaaggaagacagtggctgtacccctgggaaggccaagaggaaggcccaaggcatccgcacgggcaagtgtgtggccttcaacgacactgtgaagacgtgtgagatctttggctggtgccccgtggaggtggatgacgacatcccgcgccctgcccttctccgagaggccgagaacttcactcttttcatcaagaacagcatcagctttccacgcttcaaggtcaacaggcgcaacctggtggaggaggtgaatgctgcccacatgaagacctgcctctttcacaagaccctgcaccccctgtgcccagtcttccagcttggctacgtggtgcaagagtcaggccagaacttcagcaccctggctgagaagggtggagtggttggcatcaccatcgactggcactgtgacctggactggcacgtacggcactgcagacccatctatgagttccatgggctgtacgaagagaaaaatctctccccaggcttcaacttcaggtttgccaggcactttgtggagaacgggaccaactaccgtcacctcttcaaggtgtttgggattcgctttgacatcctggtggacggcaaggccgggaagtttgacatcatccctacaatgaccaccatcggctctggaattggcatctttggggtggccacagttctctgtgacctgctgctgcttcacatcctgcctaagaggcactactacaagcagaagaagttcaaatacgctgaggacatggggccaggggcggctgagcgtgacctcgcagctaccagctccaccctgggcctgcaggagaacatgaggacatcctgatgctcgggccccaactcctgactgggtacagcgtgaggcttcagcctggagccctggtgggtcccagccagggcagaggggcctccccaggaagtctcctaccctctcagccgggcagagagcagtttgccagaagctcagggtgcatagtaggagagacctgtgcaaatctgagctccggctccgaccccacacaccctgagggagccctaccctagcctcagccgctcctggtggggaatggctggggctgggcaggaccctcccacacacctgcaccctagcttcgtgcttctctctccggactctcattatccaacccgctgcctccatttctctagatctgtgctctccgatgtggcagtcagtaaccataggtgactaaattaaactaaaataaaatagaatgaaacacaaaattcaattcctcggctgaactagccacatttcaactgctcagtagatacgtgtggttagtggctgccatactggacagctcggggcattttcactgtcaaagaaagttctattagacagccctgcttgagccctgtttcttcctggccttcggtttccctggggaacttatcgacaatgcaagctcctgggcccacccccagacctcctgaaccaaaagctccagggctggccgtatgatctgtgtggatggcaaactccccaggccattctgggacctaagtttaagaagtgccgtcctcgaactttctgactctaagctcctgagcgggagtcagacttagccctgagcctgcacttcctgttcaggtgcagacactgaacagggtctcaaacaccttcagcatgtgtgttgtgtgctcacgtgccacacagtgtctcatgcacacaacccagtgtacacaccacctacgtgcacacagcatccttccacactgtgtatgtgaacagcttgggccctgcaaacacaaccatctacacacatctacacccccaagcacacacacatggtccgtgccatgtcacctccatagggaaaggcttctctccaagtgtgccaggccaggacagccctcccagccatgaatccttactcagctacctcgggttggggtgggagccccagccaaatcctgggctccctgcctgtggctcagccccagctcccaaggcctgcctggctctgtctgaacagaaggtctgggggaagcgaggggtggagtacaataaagggaatgaggacgaaaaaaaaaaaaaaaaa

SEQ ID NO: 215 - DNA, 2620 bp, human
agggaccgtgcgctgcctggggaagcaatgcaagtctccatagcctgcacagagcacaatttgaagagtcggaatggtgaggaccgacttctgagcaagcagagctccaccgcccccaatgtggtgaacgcagcccgggccaaattccgcacggtcgctatcatcgcgcgcagcctggggacgttcacgcctcagcatcacatttctctcaaagagtccaccgcaaagcagactggcatgaaatataggaatcttggaaaatcaggactcagagtttcttgcttgggtcttggaacatgggtgacatttggaggtcaaatttcagatgaggttgctgaacggctgatgaccatcgcctatgaaagtggtgttaacctctttgatactgccgaagtctatgctgctggaaaggctgaagtgattctggggagcatcatcaagaagaaaggctggaggaggtccagtctggtcataacaaccaaactctactggggtggaaaagctgaaacagaaagagggctgtcaagaaagcatattattgaaggattgaagggctccctccagaggctgcagctcgagtatgtggatgtggtctttgcaaatcgaccggacagtaacactcccatggaagaaattgtccgagccatgacacatgtgataaaccaaggcatggcgatgtactggggcacctcgagatggagtgctatggagatcatggaagcctattctgtagcaagacagttcaatatgatcccaccggtctgtgaacaagctgagtaccatcttttccagagagagaaagtggaggtccagctgccagagctctaccacaaaataggtgttggcgcaatgacatggtctccacttgcctgtggaatcatctcaggaaaatacggaaacggggtgcctgaaagttccagggcttcactgaagtgctaccagtggttgaaagaaagaattgtaagtgaagaagggagaaaacagcaaaacaagctaaaagacctttccccaattgcggagcgtctgggatgcacactacctcagctagctgttgcgtggtgcctgagaaatgaaggtgtgagttctgtgctcctgggatcatccactcctgaacaactcattgaaaaccttggtgccattcaggttctcccaaagatgacatcacatgtggtaaatgagattgataacatactgcgcaacaagccctacagcaagaaggactatagatcataaggcaatgcatgaaccacagaagctgcatggttaaaatagcggcctgtgcccagtacagaaaggtgttactaaccagtcttttgaatcacttagcagcttgctcgtcaacctctagtgtccctccctggattctttgaggtgtctgctgtcgctaccactgtgcacatctgaaaactcacaaccaagaaaatccattctattttcttatcttggactggagtcacctattcttgcattgctgtatacacctcatgcttatgcaatgggaagaatatgggggccagggggtgtggtactaccttcaggcatttggtaactcaaagaaggctgtacagatatattttttcaaaaagaacaaaatccacagatgcaatgtgagttgcgtaagaaacagagtagatagactaaattcagtgaaggaaaggaattgagagatttttcttagtaaatagattattgttaagtaaatagttattaaaaatatatctcactgcaaaaaaaaaaaaagcagtatcttcactcaaaagtcttgcttggaagaataagcagaaagaattttatatattttttttctattttcacattcatactaacaagttttgttccatttgttattcaataaaacaaaaatttctaggtatttgctttattacctttcaaatatttactgttgcttggccccaagaatggccttgtacaacttatccagaatgtctattaggattctaatgttatgtccacttacaagtagagacagtaaaaggatgaatacccaatctttagtgacaatgcagctgatttatgaaagagagggctacactgctatggaaacttagcttcaaagaaaatgcaatgtatctgcaattaggtgttcattttttactacattttattaaaacctgctttatactttcaactgcttgtaggcacaacttctgcaagtttaaatatttgagctttacaaataaacatacacatgctgttttttaagtaaacctgtaaaatacccaggaaggcaaatgttcattgtttaattagcactgggattttataatataatgtttggtatttttgaggcattgttaacatgaaagtcaaccactggctttgtgaaaaatgctatgtcactattcagaatatgctgggtaaattaacttgcctagtgaaaagcaaaatgttaaagaaagaacttctggttctataatcatattatatgcactaaactatatgcatgaaagttctttgcatggattaatggggcttacccttgttgcactcgaaatctgaggtgtatctagccctgccactattggctacttaccctcattaatatcccacttgagaaaaattgtgagactatactgtgtcaatatctgtaaaaagagag

SEQ ID NO: 216 - DNA, 3863 bp, human
gagatggagactcgctctgtcacccaggctggagtgcaatggtgagatctcggctcactgcaacctccacctcctgggttcaggcgattctcctgcctcccaatcctagtagctgggagtatcaggtgagtcgcagccccaacgcacgcccggcataatttttttatttttagtcgagacgggtttcaccacgttggccaggatggtctcgaactcctgacctcaggtgatccacccgcctcggcctcccaaagcactgggattacaggcgtgagccaccgcgcccggcctccatatccattcttgggaacacttgttgcttagctgaacggagcccgcatcctgctgtggcggcactcgccccggtgctggtctgagcagacgcctcctttctcttgcagaagaagtaagtgaggaagaaatgagtgaagatgaagaacgagaaaatgaaaaccacctcttggttgttccagagtcacggttcgaccgagattccggggagagtgaagaagcagaggaagaagtgggtgagggaacgccgcagagcagcgccctgacagagggcgactatgtgcccgactcccctgccctgtcgcccatcgagctcaagcaggagctgcccaagtacctgccggccctgcagggctgccggagcgtcgaggagttccagtgcctgaacaggatcgaggagggcacctatggagtggtctacagagcaaaagacaagaaaacagatgaaattgtggctctaaagcggctgaagatggagaaggagaaggagggcttcccgatcacgtcgctgagggagatcaacaccatcctcaaggcccagcatcccaacatcgtcaccgttagagagattgtggtgggcagcaacatggacaagatctacatcgtgatgaactatgtggagcacgacctcaagagcctgatggagaccatgaaacagcccttcctgccaggggaggtgaagaccctgatgatccagctgctgcgtggggtgaaacacctgcacgacaactggatcctgcaccgtgacctcaagacgtccaacctgctgctgagccacgccggcatcctcaaggtgggtgacttcgggctggcgcgggagtacggatcccctctgaaggcctacaccccggtcgtggtgaccctgtggtaccgcgccccagagctgctgcttggtgccaaggaatactccacggccgtggacatgtggtcagtgggttgcatcttcggggagctgctgactcagaagcctctgttccccgggaagtcagaaatcgatcagatcaacaaggtgttcaaggatctggggacccctagtgagaaaatctggcccggctacagcgagctcccagcagtcaagaagatgaccttcagcgagcacccctacaacaacctccgcaagcgcttcggggctctgctctcagaccagggcttcgacctcatgaacaagttcctgacctacttccccgggaggaggatcagcgctgaggacggcctcaagcatgagtatttccgcgagacccccctccccatcgacccctccatgttccccacgtggcccgccaagagcgagcagcagcgtgtgaagcggggcaccagcccgaggccccctgagggaggcctgggctacagccagctgggtgacgacgacctgaaggagacgggcttccaccttaccaccacgaaccagggggcctctgccgcgggccccggcttcagcctcaagttctgaaggtcagagtggaccccgtcatggggagaactcagccgggaccacaggcgtggctactgcggctggagctgcgatgagactcggaactcctcgtcttactttgtgctccatgttttgtttttgtattttggtttgtaaatttgtagaattaaatcattttccttgtaaacccgaattcgggaccatcacagtttgattagcctcagcctcaagagctggcacatgcttgtgaacttgtgctttcatattttcctaacctgtgtgctctttgtgggaggaataacccagactaggaatgccagcatctgccaagcagttgggataattcttcactattccacccttgccacagtactatgggtaggagtgacagctcgaaatatctacaaacaagtcactaaaaaagctaaaagatgccaggatcctgatgaaccaccacctccaccaagaccaatgctcagattttacctgattggtggtggtatccccatcattgtttgcggcataactgcaggcagcgaacattaagaattacggcagtcggccaaacgcaccctattgctggatggcatgggaaccctccttgggagccttctatgggccagccagcttcagcacttttgtaaactgcatgtactttctgagcatatttattcagttgaaaagacaccctgagcgcaaatatgagcttaaggagcccactggccagcaacagagattggcatgccaatgaaaatggcgaaataaatcatcaggaaatcatttctttgtctctgatttctacatcagccttggaaaatgagcacacttttcattctcagctcttggggccagccttactttgctcttatatgttgcactgtggatgtttggggctttggctgtttctttgtattaccctttggacttggtttttagcttcgtttttggagccacaagtttaagcttcagtgcattcttcatggtccaccattgtgttaatagggaggatcttagacttgcgtggatcatgacttgctgcccaggacggagctcgtattcagtgcaagtcaacgtccagccccccaactctaatgggacgaatggagaggcacccaaatgccccaatagcagtgcggagtcttcatgcacaaacaaaagtgattcaagcttcaaaattcctcccagggctgcaaattaacaaacttgcaggcggctgcagctcagtgccatgccaattctttacctttgaactccacccctcagcttgataatagtctgacagaacattcaatggacaatgatattaaaatgcacgctggcgcctttagaagttcagtttcgaacaaatgtgcactcaagccgccaccataaaaacagaagtaaaggacaccgggcaagccgactcacagtcctgagagaatatgcctacgatgtcccaacgagcgtggaaggaagcgtgcagaacggcttacctaaaagccggctgggcaataacgaaggacactcgaggagccgaagagcttatttagcctacagagagagacagtacaacccaccccagcaagacagcagcgatgcttgtagcacacttcccaaaagtagcagaaattttgaaaagccagtttcaaccactagtaaaaagatgcgttaagggaagccagctgtggttgaacttcaaaatcagcaaaaatcttatggcctcaacttggccattcagaatggaccaattaaaagcaatgggcaggagggacccttgctcggtaccgatagcactggcaatgttaccactggattatggaaacacgaaactactgtgtaacattgctgggcttcctaggcagaaattcatataaactgtgatactcacattccttgaagctatgagcatttaaaaactgtttacagccaccatagggattcaaaagaatttggaataaactttgaagttttggattttacttatttttatccccaaattgttgctattttttaggatctgaaacaaaatctttctaaaacattgttttagttgtcaaagcaccaacaggacattttgggatgtgaaatgtaatttcttggaatctgtaatttgtacttaatatttcaggcttgtatttaatataataaataggtgtttgtt

SEQ ID NO: 217 - DNA, 1837 bp, human
ggcacgagggagcagcccagcgtgcccattccagcgcccgcgtccccgcagcatgccgcgcccccgcctgctggccgcgctgtgcggcgcgctgctctgcgcccccagcctcctcgtcgccctggatatctgttccaaaaacccctgccacaacggtggtttatgcgaggagatttcccaagaagtgcgaggagatgtcttcccctcgtacacctgcacgtgccttaagggctacgcgggcaaccactgtgagacgaaatgtgtcgagccactgggcatggagaatgggaacattgccaactcacagatcgccgcctcatctgtgcgtgtgaccttcttgggtttgcagcattgggtcccggagctggcccgcctgaaccgcgcaggcatggtcaatgcctggacacccagcagcaatgacgataacccctggatccaggtgaacctgctgcggaggatgtgggtaacaggtgtggtgacgcagggtgccagccgcttggccagtcatgagtacctgaaggccttcaaggtggcctacagccttaatggacacgaattcgatttcatccatgatgttaataaaaaacacaaggagtttgtgggtaactggaacaaaaacgcggtgcatgtcaacctgtttgagacccctgtggaggctcagtacgtgagattgtaccccacgagctgccacacggcctgcactctgcgctttgagctactgggctgtgagctgaacggatgcgccaatcccctgggcctgaagaataacagcatccctgacaagcagatcacggcctccagcagctacaagacctggggcttgcatctcttcagctggaacccctcctatgcacggctggacaagcagggcaacttcaacgcctgggttgcggggagctacggtaacgatcagtggctgcagatcttccctggcaactgggacaaccactcccacaagaagaacttgtttgagacgcccatcctggctcgctatgtgcgcatcctgcctgtagcctggcacaaccgcatcgccctgcgcctggagctgctgggctgttagtggccacctgccacccccaggtcttcctgctttccatgggcccgctgcctcttggcttctcagcccctttaaatcaccatagggctggggactggggaaggggagggtgttcagaggcagcaccaccacacagtcacccctccctccctctttcccaccgtccacctctcacgggccctgccccagcccctaagccccgtcccctaacccccagtcctcactgtcctgttttcttaggcactgagggatctgagtaggtctgggatggacaggaaagggcaaagtagggcgtgtggtttccctgcccctgtccggaccgccgatcccaggtgcgtgtgtctctgtctctcctagcccctctctcacacatcacattcccatggtggcctcaagaaaggcccggaagcgccaggctggagataacagcctcttgcccgtcggccctgcgtcggccctggggtaccatgtggccacaactgctgtggccccctgtccccaagacacttccccttgtctccctggttgcctctcttgccccttgtcctgaagcccagcgacacagaagggggtggggcgggtctatggggagaaagggagcgaggtcagaggagggcatgggttggcagggtgggcgtttggggccctctatgctggcttttcaccccagaggacacaggcagcttccaaaatatatttatcttcttcacgggaaaaaaaaaaaaaaaaaaaaaaaaaaaaaaaaaaaaaaaaaaaaaaaaaaaaaaaaaaaaaaaaaaa

SEQ ID NO: 218 - DNA, 2604 bp, human
cagccagccgggaaccttccctcgcgggctcccagggcgggtctcttcctctctctagccctgctcaggcattcggcaggtccagcagaggtacacctcctgcagcgggttccaagtgcacctccagcctgatgggcctgaccaaggaggcttccaggagcacagaaggggctgcaacccaggtacccagagagtgagcagctccacgcgggactgtgcacggtggccgacacccgcagggacgcccgccggacgagcacgcggagggccctcgcctccacggatgcaccatgccggtgtgaggagcatctgttcttcccactctctgcagttaacaaacccaacccaaaccaccacaggtgctcctcctggggagtttcctgtctgacaaatgccaggctcacttcaaggagaatcacgcttctttctaaagatggattcaccatttaaaacagagctctgggagcctttcggcaaatcttgaaagctgcacggtgcagagacatggatgtgacttcccaagcccggggcgtgggcctggagatgtacccaggcaccgcgcagcctgcggcccccaacaccacctcccccgagctcaacctgtcccacccgctcctgggcaccgccctggccaatgggacaggtgagctctcggagcaccagcagtacgtgatcggcctgttcctctcgtgcctctacaccatcttcctcttccccatcggctttgtgggcaacatcctgatcctggtggtgaacatcagcttccgcgagaagatgaccatccccgacctgtacttcatcaacctggcggtggcggacctcatcctggtggccgactccctcattgaggtgttcaacctgcacgagcggtactacgacatcgccgtcctgtgcaccttcatgtcgctcttcctgcaggtcaacatgtacagcagcgtcttcttcctcacctggatgagcttcgaccgctacatcgccctggccagggccatgcgctgcagcctgttccgcaccaagcaccacgcccggctgagctgtggcctcatctggatggcatccgtgtcagccacgctggtgcccttcaccgccgtgcacctgcagcacaccgacgaggcctgcttctgtttcgcggatgtccgggaggtgcagtggctcgaggtcacgctgggcttcatcgtgcccttcgccatcatcggcctgtgctactccctcattgtccgggtgctggtcagggcgcaccggcaccgtgggctgcggccccggcggcagaaggcgctccgcatgatcctcgcggtggtgctggtcttcttcgtctgctggctgccggagaacgtcttcatcagcgtgcacctcctgcagcggacgcagcctggggccgctccctgcaagcagtctttccgccatgcccaccccctcacgggccacattgtcaacctcgccgccttctccaacagctgcctaaaccccctcatctacagctttctcggggagaccttcagggacaagctgaggctgtacattgagcagaaaacaaatttgccggccctgaaccgcttctgtcacgctgccctgaaggccgtcattccagacagcaccgagcagtcggatgtgaggttcagcagtgccgtgtagacagccttggccgcataggcccagccagggtgtgactcgggagctgcacacacctgggtggacacaaggcacggccacgtcatgtctctaaactgcggtcagatgtggcttctggctcctcggggcctcgcgagggtcacgcttgcctggtcaccctggggctgcttaggaaacctcacgactggtcaccttgcactcctcacacagaattgctacaatcccaaagcgctcgccccgcagggtccaaaggccagcggtgaccagcctgtcacccagctcctccccgccaaccctgcctgccgctgcacctgcctgccgctgcaggaaacatttctgacaccgtcgaccaggaaagccacacggagaggccactgtgggtgaagcgcctcagttacacaggaaccctaaagcaaatctgccaccgtgggggaactgacgctggagatgcaaggtgctggtgggtctgagctggacgtcgcggtgtgtcctctgtgcccacggtctgagctagctagcgcaccgccgagttaaagaggagaaggaaaacatgctgctctggtgcacgcctgagcgtcctccatcttccaggatggcagcaatggcgctgtgcgcctcaccaggcccacgaggagcagcagcgctcggcccggagcagcaggaaggcccctctgtggagcgcccgccgtctgctccggggtggttcagtcactgcttgttgacatcaacatggcaattgcactcatgtggactgggaccgtgcgagctgccgtgtgggttagtcgggtgccaggacaatgaaatactccagcacctgtggctgacgaatttgtttctacagaaataacagctggggacaactgcggtgatgatgtaaaaaccttcccataaaatgtaagaaaagctgatgaggctggtgacgttcagcctttgtcaataaacctgtcatgtgcggaaaaaaaaaaaaaaaaaaaa

SEQ ID NO: 219 - DNA, 503 bp, human
ggcatttgcagtgtgttggtgatccacgaaaggaaaatcacggaagcaggatagaaatccagctgcagacaagacctcaggtcgatgaatcttgacaagcagttgagctgtttttttctactcacctaggacagtcaggcagaagtatgcaaaatgactggggctgattcttttctgaattgtcgcaaacagcaagaggacttgagtcctagcattaaagagttcaacatgtctaggtccaagaccactgttgtgtttgaaggatgtaaaaccctgctgcataggatggaatatttggagggaggatcctgaaaaacatgagggatcaaatagtcctcaactttctaggacaaagggagcagctatttgccatctaccctccagaataaagaaatcttatcattcaccatctaccctctagaataaagaaatcttatcattcgccatctaccctgtagaataaagaaatcttatcattcaccgtctaccctctagagtaaaca

SEQ ID NO: 220 - DNA, 724 bp, human
ggtgagccccgagattctggctcagagaggtgtcatgggcttccaaaagttctcccccttcctggctctcagcatcttggtcctgttgcaggcaggcagcctccatgcagcaccattcaggtctgccctggagagcagcccagcagacccggccacgctcagtgaggacgaagcgcgcctcctgctggctgcactggtgcaggactatgtgcagatgaaggccagtgagctggagcaggagcaagagagagagggctccagcctggacagccccagatctaagcggtgcggtaatctgagtacttgcatgctgggcacatacacgcaggacttcaacaagtttcacacgttcccccaaactgcaattggggttggagcacctggaaagaaaagggatatgtccagcgacttggagagagaccatcgccctcatgttagcatgccccagaatgccaactaaactcctccctttccttcctaatttcccttcttgcatccttcctataacttgatgcatgtggtttggttcctctctggtggctctttgggctggtattggtggctttccttgtggcagaggatgtctcaaacttcagatgggaggaaagagagcaggactcacaggttggaagagaatcacctgggaaaataccagaaaatgagggccgctttgagtcccccagagatgtcatcagagctcctctgtcctgctttctgaatgtgc

SEQ ID NO: 221 - DNA, 3766 bp, human
cccagccaggacatggccgcacctctcctcatcaggagcgccggctcacggacttctcgcccaactccctgagcgctccctcgtttcgatctttagaaaaccctgctttctttctggggccgtgacgaggggcagggagcggcgagcaaggatgcgttgaggaccgcgagggcgcgcgtctcgggtgccgccgtgggtcccgacgcggaagccgagccgcctccgcctgcctcgacttccccacagcgcttccgccgccgcctgccgtgcttgatgtgcagaaagaagccggacaccatgatcctaacacaaattgaagccaaggaagcttgtgattggctacgggcaactggtttcccccagtatgcacagctttatgaagatttcctgttccccatcgatatttccttggtcaagagagagcatgattttttggacagagatgccattgaggctctatgcaggcgtctaaatactttaaacaaatgtgcagtgatgaagctagaaattagtcctcatcggaaacgaagtgacgattcagacgaggatgagccttgtgccatcagtggcaaatggactttccaaagggacagcaagaggtggtcccggcttgaagagtttgatgtcttttctccaaaacaagacctggtccctgggtccccagacgactcccacccgaaggacggccccagccccggaggcacgctgatggacctcagcgagcgccaggaggtgtcttccgtccgcagcctcagcagcactggcagcctccccagccacgcgccccccagcgaggatgctgccaccccccggactaactccgtcatcagcgtttgctcctccagcaacttggcaggcaatgacgactctttcggcagcctgccctctcccaaggaactgtccagcttcagcttcagcatgaaaggccacgaaaaaactgccaagtccaagacgcgcagtctgctgaaacggatggagagcctgaagctcaagagctcccatcacagcaagcacaaagcgccctcaaagctggggttgatcatcagcgggcccatcttgcaagaggggatggatgaggagaagctgaagcagctcaactgcgtggagatctccgccctcaatggcaaccgcatcaacgtccccatggtacgaaagaggagcgtttccaactccacgcagaccagcagcagcagcagccagtcggagaccagcagcgcggtcagcacgcccagccctgttacgaggacccggagcctcagtgcgtgcaacaagcgggtgggcatgtacttagagggcttcgatcctttcaatcagtcaacatttaacaacgtgatggagcagaactttaagaaccgcgagagctacccagaggacacggtgttctacatccctgaagatcacaagcctggcactttccccaaagctctcaccaatggcagtttctccccctcggggaataacggctctgtgaactggaggacgggaagcttccacggccctggccacatcagcctcaggagggaaaacagtagcgacagccccaaggaactgaagagacgcaattcttccagctccatgagcagccgcctgagcatctacgacaacgtgccgggctccatcctctactccagttcaggggacctggcggatctggagaacgaggacatcttccccgagctggacgacatcctctaccacgtgaaggggatgcagcggatagtcaatcagtggtcggagaagttttctgatgagggagattcggactcagccctggactcggtctctccctgcccgtcctctccaaaacagatacacctggatgtggacaacgaccgaaccacacccagcgacctggacagcacaggcaactccctgaatgaaccggaagagccctccgagatcccggaaagaagggattctggggttggggcttccctaaccaggtccaacaggcaccgactgagatggcacagtttccagagctcacatcggccaagcctcaactctgtatcactacagattaactgccagtctgtggcccagatgaacctgctgcagaaatactcactcctaaagctaacggccctgctggagaaatacacaccttctaacaagcatggttttagctgggccgtgcccaagttcatgaagaggatcaaggttccagactacaaggaccggagtgtgtttggggtcccactgacggtcaacgtgcagcgcacaggacaaccgttgcctcagagcatccagcaggccatgcgatacctccggaaccattgtttggatcaggttgggctcttcagaaaatcgggggtcaagtcccggattcaggctctgcgccagatgaatgaaggtgccatagactgtgtcaactacgaaggacagtctgcttatgacgtggcagacatgctgaagcagtattttcgagatcttcctgagccactaatgacgaacaaactctcggaaacctttctacagatctaccaatatgtgcccaaggaccagcgcctgcaggccatcaaggctgccatcatgctgctgcctgacgagaaccgggaggttctgcagaccctgctttatttcctgagcgatgtcacagcagccgtaaaagaaaaccagatgaccccaaccaacctggccgtgtgcttagcgccttccctcttccatctcaacaccctgaagagagagaattcctctcccagggtaatgcaaagaaaacaaagtttgggcaaaccagatcagaaagatttgaatgaaaacctagctgccactcaagggctggcccatatgatcgccgagtgcaagaagcttttccaggttcccgaggaaatgagccgatgtcgtaattcctataccgaacaagagctgaagcccctcactctggaagcactcgggcacctgggtaatgatgactcagctgactaccaacacttcctccaggactgtgtggatggcctgtttaaagaagtcaaagagaagtttaaaggctgggtcagctactccacttcggagcaggctgagctgtcctataagaaggtgagcgaaggaccccctctgaggctttggaggtcagtcattgaagtccctgctgtgccagaggaaatcttaaagcgcctacttaaagaacagcacctctgggatgtagacctgttggattcaaaagtgatcgaaattctggacagccaaactgaaatttaccagtatgtccaaaacagtatggcacctcatcctgctcgagactacgttgttttaagaacctggaggactaatttacccaaaggagcctgtgcccttttactaacctctgtggatcacgatcgcgcacctgtggtgggtgtgagggttaatgtgctcttgtccaggtatttgattgaaccctgtgggccaggaaaatccaaactcacctacatgtgcagagttgacttaaggggccacatgccagaatggtacacaaaatcttttggacatttgtgtgcagctgaagttgtaaagatccgggattccttcagtaaccagaacactgaaaccaaagacaccaaatctaggtgatcactgaagcaacgcaaccgcttccaccaccatggtgtttgtttctagaacttttgccagtccttgaagaatgggttctgtgtctaatcctgaaacaaagaaaactacaagctggagtgtaggaattgactatagcaatttgatacatttttaaagctgcttcctgtttgttgagggtctgtattcatagaccttgactggaatatgtaagactgtg

SEQ ID NO: 222 - DNA, 3077 bp, human
aacagaactgcaacggagagactcaagatgattccctttttacccatgttttctctactattgctgcttattgttaaccctataaacgccaacaatcattatgacaagatcttggctcatagtcgtatcaggggtcgggaccaaggcccaaatgtctgtgcccttcaacagattttgggcaccaaaaagaaatacttcagcacttgtaagaactggtataaaaagtccatctgtggacagaaaacgactgttttatatgaatgttgccctggttatatgagaatggaaggaatgaaaggctgcccagcagttttgcccattgaccatgtttatggcactctgggcatcgtgggagccaccacaacgcagcgctattctgacgcctcaaaactgagggaggagatcgagggaaagggatccttcacttactttgcaccgagtaatgaggcttgggacaacttggattctgatatccgtagaggtttggagagcaacgtgaatgttgaattactgaatgctttacatagtcacatgattaataagagaatgttgaccaaggacttaaaaaatggcatgattattccttcaatgtataacaatttggggcttttcattaaccattatcctaatggggttgtcactgttaattgtgctcgaatcatccatgggaaccagattgcaacaaatggtgttgtccatgtcattgaccgtgtgcttacacaaattggtacctcaattcaagacttcattgaagcagaagatgacctttcatcttttagagcagctgccatcacatcggacatattggaggcccttggaagagacggtcacttcacactctttgctcccaccaatgaggcttttgagaaacttccacgaggtgtcctagaaaggttcatgggagacaaagtggcttccgaagctcttatgaagtaccacatcttaaatactctccagtgttctgagtctattatgggaggagcagtctttgagacgctggaaggaaatacaattgagataggatgtgacggtgacagtataacagtaaatggaatcaaaatggtgaacaaaaaggatattgtgacaaataatggtgtgatccatttgattgatcaggtcctaattcctgattctgccaaacaagttattgagctggctggaaaacagcaaaccaccttcacggatcttgtggcccaattaggcttggcatctgctctgaggccagatggagaatacactttgctggcacctgtgaataatgcattttctgatgatactctcagcatggttcagcgcctccttaaattaattctgcagaatcacatattgaaagtaaaagttggccttaatgagctttacaacgggcaaatactggaaaccatcggaggcaaacagctcagagtcttcgtatatcgtacagctgtctgcattgaaaattcatgcatggagaaagggagtaagcaagggagaaacggtgcgattcacatattccgcgagatcatcaagccagcagagaaatccctccatgaaaagttaaaacaagataagcgctttagcaccttcctcagcctacttgaagctgcagacttgaaagagctcctgacacaacctggagactggacattatttgtgccaaccaatgatgcttttaagggaatgactagtgaagaaaaagaaattctgatacgggacaaaaatgctcttcaaaacatcattctttatcacctgacaccaggagttttcattggaaaaggatttgaacctggtgttactaacattttaaagaccacacaaggaagcaaaatctttctgaaagaagtaaatgatacacttctggtgaatgaattgaaatcaaaagaatctgacatcatgacaacaaatggtgtaattcatgttgtagataaactcctctatccagcagacacacctgttggaaatgatcaactgctggaaatacttaataaattaatcaaatacatccaaattaagtttgttcgtggtagcaccttcaaagaaatccccgtgactgtctataagccaattattaaaaaatacaccaaaatcattgatggagtgcctgtggaaataactgaaaaagagacacgagaagaacgaatcattacaggtcctgaaataaaatacactaggatttctactggaggtggagaaacagaagaaactctgaagaaattgttacaagaagaggtcaccaaggtcaccaaattcattgaaggtggtgatggtcatttatttgaagatgaagaaattaaaagactgcttcagggagacacacccgtgaggaagttgcaagccaacaaaaaagttcaaggttctagaagacgattaagggaaggtcgttctcagtgaaaatccaaaaaccagaaaaaaatgtttatacaaccctaagtcaataacctgaccttagaaaattgtgagagccaagttgacttcaggaactgaaacatcagcacaaagaagcaatcatcaaataattctgaacacaaatttaatatttttttttctgaatgagaaacatgagggaaattgtggagttagcctcctgtggagttagcctcctgtggtaaaggaattgaagaaaatataacaccttacaccctttttcatcttgacattaaaagttctggctaactttggaatccattagagaaaaatccttgtcaccagattcattacaattcaaatcgaagagttgtgaactgttatcccattgaaaagaccgagccttgtatgtatgttatggatacataaaatgcacgcaagccattatctctccatgggaagctaagttataaaaataggtgcttggtgtacaaaactttttatatcaaaaggctttgcacatttctatatgagtgggtttactggtaaattatgttattttttacaactaattttgtactctcagaatgtttgtcatatgcttcttgcaatgcatattttttaatctcaaacgtttcaataaaaccatttttcagatataaagagaattacttcaaattgagtaattcagaaaaactcaagatttaagttaaaaagtggtttggacttgggaacag

SEQ ID NO: 223 - DNA, 1846 bp, human
ttagagccgggtaggggagcgcagcggccagatacctcagcgctacctggcggaactggatttctctcccgcctgccggcctgcctgccacagccggactccgccactccggtagcctcatggctgcaacctgtgagattagcaacatttttagcaactacttcagtgcgatgtacagctcggaggactccaccctggcctctgttccccctgctgccacctttggggccgatgacttggtactgaccctgagcaacccccagatgtcattggagggtacagagaaggccagctggttgggggaacagccccagttctggtcgaagacgcaggttctggactggatcagctaccaagtggagaagaacaagtacgacgcaagcgccattgacttctcacgatgtgacatggatggcgccaccctctgcaattgtgcccttgaggagctgcgtctggtctttgggcctctgggggaccaactccatgcccagctgcgagacctcacttccagctcttctgatgagctcagttggatcattgagctgctggagaaggatggcatggccttccaggaggccctagacccagggccctttgaccagggcagcccctttgcccaggagctgctggacgacgtctccaccgcagggactggtgcttctcggagctcccactcctcagactccggtggaagtgacgtggacctggatcccactgatggcaagctcttccccagcgatggttttcgtgactgcaagaagggggatcccaagcacgggaagcggaaacgaggccggccccgaaagctgagcaaagagtactgggactgtctcgagggcaagaagagcaagcacgcgcccagaggcacccacctgtgggagttcatccgggacatcctcatccacccggagctcaacgagggcctcatgaagtgggagaatcggcatgaaggcgtcttcaagttcctgcgctccgaggctgtggcccaactatggggccaaaagaaaaagaacagcaacatgacctacgagaagctgagccgggccatgaggtactactacaaacgggagatcctggaacgggtggatggccggcgactcgtctacaagtttggcaaaaactcaagcggctggaaggaggaagaggttctccagagtcggaactgagggttggaactatacccgggaccaaactcacggaccactcgaggcctgcaaaccttcctgggaggacaggcaggccagatggcccctccactggggaatgctcccagctgtgctgtggagagaagctgatgttttggtgtattgtcagccatcgtcctgggactcggagactatggcctcgcctccccaccctcctcttggaattacaagccctggggtttgaagctgactttatagctgcaagtgtatctccttttatctggtgcctcctcaaacccagtctcagacactaaatgcagacaacaccttcctcctgcagacacctggactgagccaaggaggcctggggaggccctaggggagcaccgtgatggagaggacagagcaggggctccagcaccttctttctggactggcgttcacctccctgctcagtgcttgggctccacgggcaggggtcagagcactccctaatttatgtgctatataaatatgtcagatgtacatagagatctattttttctaaaacattcccctccccactcctctcccacagagtgctggactgttccaggccctccagtgggctgatgctgggacccttaggatggggctcccagctcctttctcctgtgaatggaggcagagacctccaataaagtgccttctgggctttttct

SEQ ID NO: 224 - DNA, 1501 bp, human
atgacccccatcctcacggtcctgatctgtctcgggctgagtctgggccccaggacccacgtgcaggcagggcacctccccaagcccaccctctgggctgagccaggctctgtgatcatccagggaagtcctgtgaccctcaggtgtcaggggagccttcaggctgaggagtaccatctatatagggaaaacaaatcagcatcctgggttagacggatacaagagcctgggaagaatggccagttccccatcccatccatcacctgggaacacgcagggcggtatcactgtcagtactacagccacaatcactcatcagagtacagtgaccccctggagctggtggtgacaggagcctacagcaaacccaccctctcagctctgcccagccctgtggtgaccttaggagggaacgtgaccctccagtgtgtctcacaggtggcatttgacggcttcattctgtgtaaggaaggagaagatgaacacccacaacgcctgaactcccattcccatgcccgtgggtggtcctgggccatcttctccgtgggccccgtgagcccgagtcgcaggtggtcgtacaggtgctatgcttatgactcgaactctccctatgtgtggtctctacccagtgatctcctggagctcctggtcccaggtgtttctaagaagccatcactctcagtgcagccaggtcctatggtggcccctggggagagcctgaccctccagtgtgtctctgatgtcggctacgacagatttgttctgtataaggagggagaacgtgacttcctccagcgccctggttggcagccccaggctgggctctcccaggccaacttcaccctgggccctgtgagcccctcccacgggggccagtacagatgctacagtgcacacaacctctcctccgagtggtcggcccccagtgaccccctggacatcctgatcacaggacagttctatgacagaccctctctctcggtgcagccggtccccacagtagccccaggaaagaacgtgaccctgctgtgtcagtcacgggggcagttccacactttccttctgaccaaggagggggcaggccatcccccactgcatctgagatcagagcaccaagctcagcagaaccaggctgaattccgcatgggtcctgtgacctcagcccacgtggggacctacagatgctacagctcactcagctccaacccctacctgctgtctctccccagtgaccccctggagctcgtggtctcagaagcagctgagaccctcagcccatcacaaaacaagacagactccacgactacatccctaggccaacacccccaggattacacagtggagaatctcatccgcatgggtgtggctggcttggtcctggtggtcctcgggattctgctatttgaggctcagcacagccagagaagcctacaagatgcagccgggaggtgaacagcagagaggacaatgcatacttcagcgtggtggagcctcagggaca

SEQ ID NO: 225 - DNA, 1452 bp, human
tcatccatccgcagagcagggcagtgggaggagacgccatgacccccatcctcacggtcctgatctgtctcgggcacctccccaagcccaccctctgggctgagccaggctctgtgatcatccagggaagtcctgtgaccctcaggtgtcaggggagccttcaggctgaggagtaccatctatatagggaaaacaaatcagcatcctgggttagacggatacaagagcctgggaagaatggccagttccccatcccatccatcacctgggaacacgcagggcggtatcactgtcagtactacagccacaatcactcatcagagtacagtgaccccctggagctggtggtgacaggagcctacagcaaacccaccctctcagctctgcccagccctgtggtgaccttaggagggaacgtgaccctccagtgtgtctcacaggtggcatttgacggcttcattctgtgtaaggaaggagaagatgaacacccacaacgcctgaactcccattcccatgcccgtgggtggtcctgggccatcttctccgtgggccccgtgagcccgagtcgcaggtggtcgtacaggtgctatgcttatgactcgaactctccctatgtgtggtctctacccagtgatctcctggagctcctggtcccaggtgtttctaagaagccatcactctcagtgcagccaggtcctatggtggcccctggggagagcctgaccctccagtgtgtctctgatgtcggctacgacagatttgttctgtataaggagggagaacgtgacttcctccagcgccctggttggcagccccaggctgggctctcccaggccaacttcaccctgggccctgtgagcccctcccacgggggccagtacagatgctacagtgcacacaacctctcctccgagtggtcggcccccagtgaccccctggacatcctgatcacaggacagttctatgacagaccctctctctcggtgcagccggtccccacagtagccccaggaaagaacgtgaccctgctgtgtcagtcacgggggcagttccacactttccttctgaccaaggagggggcaggccatcccccactgcatctgagatcagagcaccaagctcagcagaaccaggctgaattccgcatgggtcctgtgacctcagcccacgtggggacctacagatgctacagctcactcagctccaacccctacctgctgtctctccccagtgaccccctggagctcgtggtctcagcatccctaggccaacacccccaggattacacagtggagaatctcatccgcatgggtgtggctggcttggtcctggtggtcctcgggattctgctatttgaggctcagcacagccagagaagcctacaagatgcagccgggaggtgaacagcagagaggacaatgcatacttcagcgtggtggagcctcagggaca

SEQ ID NO: 226 - DNA, 661 bp, human
atgacccccatcctcacggtcctgatctgtctcgggctgagtctgggccccaggacccacgtgcaggcagggcacctccccaagcccaccctctgggctgagccaggctctgtgatcatccagggaagtcctgtgaccctcaggtgtcaggggagccttcaggctgaggagtaccatctatatagggaaaacaaatcagcatcctgggttagacggatacaagagcctgggaagaatggccagttccccatcccatccatcacctgggaacacgcagggcggtatcactgtcagtactacagccacaatcactcatcagagcaccaagctcagcagaaccaggctgaattccgcatgggtcctgtgacctcagcccacgtggggacctacagatgctacagctcactcagctccaacccctacctgctgtctctccccagtgaccccctggagctcgtggtctcagcatccctaggccaacacccccaggattacacagtggagaatctcatccgcatgggtgtggctggcttggtcctggtggtcctcgggattctgctatttgaggctcagcacagccagagaagcctacaagatgcagccgggaggtgaacagcagagaggacaatgcatacttcagcgtggtggagcctcagggaca

SEQ ID NO: 227 - DNA, 2566 bp, human
cgctttttttttttttttctttttttgagatggagcttgctctgtcacccaggctggagtgcagtggcacgatcacagctcactgcaacttccgccacctgggttcaagcaattttcctgcttcaacctcccgagtagttgagattacaggcacgtgccaccacacctgactgatttttgtatttttagtagagacagggtttcaccatgttggccaggctggtcttgaactcctgacctcaagtgatccacccacctcagtctaccaaagtgctgggattacaggttgtgagccactgcacccggcctctgtctgacttttaaatgatggagtatcccagaggtcaggctttagagctcttctttcttccatctacagagtgctcatttctttggtgatctcattcagtctcacggctttgaatgttatatgctgataagtcccaactttctctgtctcgcctaaacttcccctaatagcagaacctgatatcaaagtgcctatttgacatctccacttagatatctaataagcatctttaatgtaaaatttccaaaactgagctcctacaattccctcccacacttgttcagttttccccatctaagctaatggcaactccatccctccagttgctttggccaaaacttttgagttgtctttgactgctttttttctcccttcttacattgtgctcatcctttctttcaggcaaattctgtttggtataccttcaaatatatctagaattctatacttctcactacccctcattcccattatctttgaaacacactccaatgaggtttttacccccactattccaccaaaaacactcttgtgaaagtcaccagatgatggttcttcaggctatcatctgtctcctgaattattttaagagcctccctaactggtctccttgttccagcccctgctcccttcactctattctcaatacaacagtcagagggatcttataaaaccgtaagtcagatcatataattctgtgtgaaaccctccaatgttatcccacttcagagtaaaagttaaagggtttattttgatctctaaatattttgatccctatgatctagtctcttcttacccaaagtatgggcctcataccagcagaactggcattctctgggagcttgttagaaatgtagaatctctggtcctaagattttctaaatcagaatctgcattttcatcagctctcttggcaattcatatgtttgagaaggactgatgtagtcctctactgcctctcctgctgctatgtgctgctctagtcacactgtcctcctggctatttcgataagatggaaactctcctgcctcagggcttttgcacctactgctccctctgtctaggataatcttccccagaaaactgcatgccagttgccttatttccttcaggtctttattgaagtcactttctcattaaacactttctggcccatcctgtctaaaactgcatccccaaacccttcctatcccttttctccacttttttctttttttaaactatagttcttatcaacatagtatatgttttgcttatttatcctgtttattgtctgactcaacaagtataatttgacaaagaaaaatgatacttctctttttttgctgttccaccaaatacaattcaaatgctttttgttttatttttttaccaattccaatttcaaaatgtctcaatggtgctataataaataaacttcaacactctttatgataacaacactgtgttatattctttgaatcctagcccatctgcagagcaatgactgtgctcaccagtaaaagataacctttctttctgaaatagtcaaatacgaaattagaaaagccctccctattttaactacctcaactggtcagaaacacagattgtattctatgagtcccagaagatgaaaaaaattttatacgttgataaaacttataaatttcattgattaatctcctggaagattggtttaaaaagaaaagtgtaatgcaagaatttaaagaaatatttttaaagccacaattattttaatattggatatcaactgcttgtaaaggtgctcctcctttttcttgtcattgctggtcaagattactaatatttgggaaggctttaaagacgcatgttatggtgctaatgtactttcacttttaaactctagatcagaattgttgacttgcattcagaacataaatgcacaaaatctgtacatgtctcccatcagaaagattcattggcatgccacaggggattctcctccttcatcctgtaaaggtcaacaataaaaaccaaattatggggctgcttttgtcacactagcatagagaatgtgttgaaatttaactttgtaagcttgtatgtggttgttgatcttttttttccttacagacacccataataaaatatcatattaaaaaaaaaaaaaaaaaaaaaaaaaaaaaaaaaaaaaaaaaaaaaaaaaaaaaaaaaaaaaaaaaaaaaaaaaaaaaaaaaaaaaaaaaaaaaaaaaaaaaaaaaaaaaaaaaaaaaaaaaaaaaaaaaaaaaa

SEQ ID NO: 228 - DNA, 2144 bp, human
gcagcttccatggcctggggctgtgagaggcccgggaaggcactgtctttgcgcctgcacatgtgtgtgtctggagtgtaggatggcactggtgccgggcctggatttactcagcccagatcacggctgcttttgtttacgtggcccctgctctcacccacaactccaggtttctggctctcgggaatttgaggcctgtggctgctgtggaccctgggaaagagcctgtgcttcctgagccagtgcggggcctggcatggacttcctcatcgtcctggtctgcctcatcttcagcgtgctgtccaccatcgagcagtatgccgccctggccacggggactctcttctggatggagatcgtgctggtggtgttcttcgggacggagtacgtggtccgcctctggtccgccggctgccgcagcaagtacgtgggcctctgggggcggctgcgctttgcccggaagcccatttccatcatcgacctcatcgtggtcgtggcctccatggtggtcctctgcgtgggctccaaggggcaggtgtttgccacgtcggccatcaggggcatccgcttcctgcagatcctgaggatgctacacgtcgaccgccagggaggcacctggaggctcctgggctccgtggtcttcatccaccgccaggagctgataaccaccctgtacatcggcttcctgggcctcatcttctcctcgtactttgtgtacctggctgagaaggacgcggtgaacgagtcaggccgcgtggagttcggcagctacgcagatgcgctgtggtggggggtggtcacagtcaccaccatcggctatggggacaaggtgccccagacgtgggtcgggaagaccatcgcctcctgcttctctgtctttgccatctccttctttgcgctcccagcggggattcttggctcggggtttgccctgaaggtgcagcagaagcagaggcagaagcacttcaaccggcagatcccggcggcctcactcattcagaccgcatggaggtgctatgctgccgagaaccccgactcctccacctggaagatctacatccggaaggccccccggagccacactctgctgtcacccagccccaaacccaagaagtctgtggtggtaaagaaaaaaaagttcaagctggacaaagacaatggggtgactcctggagagaagatgctcacagtcccccatatcacgtgcgaccccccagaagagcggcggctggaccacttctctgtcgacggctatgacagttctgtaaggaagagcccaacactgctggaagtgagcatgccccatttcatgagaaccaacagcttcgccgaggacctggacctggaaggggagactctgctgacacccatcacccacatctcacagctgcgggaacaccatcgggccaccattaaggtcattcgacgcatgcagtactttgtggccaagaagaaattccagcaagcgcggaagccttacgatgtgcgggacgtcattgagcagtactcgcagggccacctcaacctcatggtgcgcatcaaggagctgcagaggaggctggaccagtccattgggaagccctcactgttcatctccgtctcagaaaagagcaaggatcgcggcagcaacacgatcggcgcccgcctgaaccgagtagaagacaaggtgacgcagctggaccagaggctggcactcatcaccgacatgcttcaccagctgctctccttgcacggtggcagcacccccggcagcggcggcccccccagagagggcggggcccacatcacccagccctgcggcagtggcggctccgtcgaccctgagctcttcctgcccagcaacaccctgcccacctacgagcagctgaccgtgcccaggaggggccccgatgaggggtcctgaggaggggatggggctgggggatgggcctgagtgagaggggaggccaagagtggccccacctggccctctctgaaggaggccacctcctaaaaggcccagagagaagagccccactctcagaggccccaataccccatggaccatgctgtctggcacagcctgcacttgggggctcagcaaggccacctcttcctggccggtgtgggggccccgtctcaggtctgagttgttacccggatcc

SEQ ID NO: 229 - DNA, 4858 bp, human
ggaattcttttttttttttttttttttgaaacagggtctcgctctgtcacccaggctaaagtgtagtgccgcgatctcagctcattacaacctctgcctcccaggttcaagggatcctcccacctcagcctcccaagcagttgggaccacaggcatgtgccaccatatccggctaatttttgcttttttcatagagacagggtttcaccatgttgcacaagtcggtcttgaactcctgagctcaagtgagctacctgctttggcctcccaaagtgctgggattacacatgtgaaccaccgtacccggccccaaaaatgctttcttaagcgtaactacgtaatgctagttgtagtttagattcctggatgttaacttaaaatagtcccataggaacccagtgtggtggctcacgcctgtaatcccagcctgaggcaggtggatcatctgaggtcaggagttcgagaccagctgggccaacatggtgaaaccctgtctctactaaaaacacaaaaaaattagctgggcatagtggcaggcacccgtaatttcagcttctcgggacgctgaggcagaagaattgcttgaacccaggaggcagtggttgcagtgagcccagatcgtgccattgcactccagcctgggcaacaagagcaaaactctgtctcaaaaaaatcaattaatttaggctgggcgcagtggctcatgcctgtaaatcccagcactttgagaggctgaagcgggtggatcatgaggtcaagagatcgagaccatcctggctaacacggtgaaaccccatttctactaaaaatacaaaaaaaaaaccccaaaaaacaaaaaaacaaaaacaaacaaacaaaccaaaaaaacacaacaactagccaggcgtagtggcaggcgcttgtaatcccagctagtcgggaggctgaggcaggaggagaatggagtgaacccaggaggcagagcttgcagtgagctgagatcgcgccacagcactccagcctgggcaacagagcgagactccatctcaggaaaaaaaaaattaattaattaaaaaaacagtaagataaataacacttctcccatttcagtaaaaggatgaagccagtttctcaatgaataaaaacaagagactgttgaatgtcaagttttatagacagtccagacaacacagggagacaccatctctacacacacacacacacacacacacacacacacacacacacacacacacacacacacaaaatagctgcgtatggtggcatgggcctgtagtcccagctattggggcagggccagggggtgggaggctgaggggagaggatgccttaacagggaggttgaggctgcagagagccatgatcacgtcactgtactccagcctgggtgatacagcaagactctgtctcagaaaaaaaaaaaagaaaaaagtcaagaatgcattcttgaggaattccaccaacaaaatgcaccaaatatagccaaagagttttctgctatatgccaagtggaaagctatgaagaaagagaagaacagaagcaggaggacattggttttcatctcctattctttcaagaagtaagatccattatcttttaaaaagtctaaacactggtaaggcaagacacaactcccacccataacactgcatctctgtcctcaggcaacaaatcaaatgtcagataaaagcacaatatctaccactcaacccccaggcttcagcacagaactcacaaacattctgctggctaaggcaaaaaggtgtactgtatttccagagagcttgcagagttctgagcactaatcccataatcctcatatctcaatctacacaaagcaccatcaggctaagaaacagattatatagcaggcacaacactcttgggtatgcaaacatgttaaggatcaaagtaagaaaagagtaactataggggccatactatatttgccaaaaagtgacttgtttaaaaattaaaaagaagccgggtgcagtggctcacacctgtaatcccagcactttgagaggctggggtgggtggatcacctgaggtcagtagttcaaaaccagcctggccaacatagtgaaaccccatctctactaaaaatacaaaattaggcgtggtggcaggcgcctgtaatcccagctactagggatgctgaggcaggagaatcgcttgaacccggaaggcagaggttgcagtgagccaaaatcgcaccactgcactccagcctgggcaacaagagcaaaactctgtctcaaaaaaaaaaaaataaaaataaaaacaaaaaagaaatccagtttacctccttgtgcaattcctaataaattgctgagaagtgatcttacataggaatcttgtataatttattctgatgcgttcgaggtggccgttagttgactccgcggagttcatctccctggttttcccgtcctaacgtcgctcgcctttcagtcaggatgtctgcccgtggcccggctatcggcatcgacctgggcaccacctattcgtgcgtcggggtcttccaacatggcaaggtggagatcatcgccaacgaccagggcaatcgcaccacccccagctacgtggccttcacggacaccgagcgcctcatcggcgacgccgccaagaaccaggtggccatgaaccccaccaacaccatcttcgacgccaagaggctgattggacggaaattcgaggatgccacagtgcagtcggatatgaaacactggccgttccgggtggtgagcgagggaggcaagcccaaagtgcaagtagagtacaagggggagaccaagaccttcttcccagaggagatatcctccatggtcctcacgaagatgaaggagatcgcggaagcctacctggggggcaaggtgcacagcgcggtcataacggtcccggcctatttcaacgactcgcagcgccaggccaccaaggacgcaggcaccatcacggggctcaatgtgctgcgcatcatcaacgagcccacggcggcggccatcgcctacggcctggacaagaagggctgcgcgggcggcgagaagaacgtgctcatctttgacctgggcggtggcactttcgacgtgtccatcctgaccatcgaggatggcatcttcgaggtgaagtccacggccggcgacacccacctgggcggtgaggacttcgacaaccgcatggtgagccacctggcggaggagttcaagcgcaagcacaagaaggacattgggcccaacaagcgcgccgtgaggcggtcgcgcaccgcttgcgagcgcgccaagcgcaccctgagctcgtccacgcaggcgagcatcgagatcgactcgctctacgagggcgtggacttctatacgtccatcacgcgcgcccgcttcgaggagctcaatgccgacctctttcgcgggaccctggagccggtggagaaggcgctgcgcgacgccaagctggacaagggccagatccaggagatcgtgctggtgggcggctccactcgtatccccaagatccagaagctgctgcaggatttcttcaacggcaaggagctgaacaagagcatcaaccccgacgaggcggtggcctatggcgccgcggtgcaggcggccatcctcatcggcgacaaatcagagaatgtgcaggacctgctgctactcgacgtgaccccgttgtcgctgggcatcgagacagctggcggtgtcatgaccccactcatcaagaggaacaccacgatccccaccaagcagacgcagaccttcaccacctactcggacaaccagagcagcgtactggtgcaggtatacgagggcgaacgggccatgaccaaggacaataacctgctgggcaagttcgacctgaccgggattccccctgcgcctcgcggggtcccccaaatcgaggttaccttcgacattgacgccaatggcatccttaacgttaccgccgccgacaagagcaccggtaaggaaaacaaaatcaccatcaccaatgacaaaggtcgtctgagcaaggacgacattgaccggatggtgcaggaggcggagcggtacaaatcggaagatgaggcgaatcgcgaccgagtcgcggccaaaaacgccctggagtcctatacctacaacatcaagcagacggtggaagacgagaaactgaggggcaagattagcgagcaggacaaaaacaagatcctcgacaagtgtcaggaggtgatcaactggctcgaccgaaaccagatggcagagaaagatgagtatgaacacaagcagaaagagctcgaaagagtttgcaaccccatcatcagcaaactttaccaaggtggtcctggcggcggcagcggcggcggcggttcaggagcctccgggggacccaccatcgaagaagtggactaagcttgcactcaagtcagcgtaaacctctttgcctttctctctctctctttttttttgtttgtttctttgaaatgtccttgtgccaagtacgagatctattgttggaagtctttggtatatgcaaatgaaaggagaggtgcaacaacttagtttaattataaaagttccaaagtttgttttttaaaaacattattcgaggtttctctttaatgcattttgcgtgtttgctgacttgagcatttttgattagttcgtgcatggagatttgtttgagatgagaaaccttaagtttgcacacctgttctgtagaagcttggaaacagtaaaatatataggagcttaaattgtttatttttatgtactactttaaaactaaactgaacattgcagtaatgttaaggacaggtatactttttgcaaacaaatgcataaaatgcaaatgtaaagtaaagctgaaattgatctcaaaaaaaaaaaa

SEQ ID NO: 230 - DNA, 1034 bp, human
caggctccggctgcggctccagcccgcgatgccccattccgtgaccctgcgcgggccttcgccctggggcttccgcctggtgggcggccgggacttcagcgcgcccctcaccatctcacgggtccatgctggcagcaaggctgcattggctgccctgtgcccaggagacctgatccaggccatcaatggtgagagcacagagctcatgacacacctggaggcacagaaccgcatcaagggctgccacgatcacctcacactgtctgtgagcaggcctgagggcaggagctggcccagtgcccctgatgacagcaaggctcaggcacacaggatccacatcgatcctgagatccaggacggcagcccaacaaccagcaggcggccctcaggcaccgggactgggccagaagatggcagaccaagcctgggatctccatatggacaaccccctcgctttccagtccctcacaatggcagcagcgaggccaccctgccagcccagatgagcaccctgcatgtgtctccaccccccagcgctgacccagccagaggcctcccgcggagccgggactgcagagtcgacctgggctccgaggtgtacaggatgctgcgggagccggccgagcccgtggccgcggagcccaagcagtcaggctccttccgctacttgcagggcatgctagaggccggcgagggcggggcaccatcgtcaaggcacgggacaagctctaccatcccgagtgcttcatgtgcagtgactgcggcctgaacctcaagcagcgtggttacttctttctggacgagcggctctactgtgagagccacgccaaggcgcgcgtgaagccgcccgagggctacgacgtggtggcggtgtaccccaatgccaaggtggaactcgtctgagctgggaccctgctcccacccctgcttcttaaggtccctgctcggccggtgtaaatatgtttcaccctgtccctctaataaagctcctctgctccaccttgaaaaaaaaaaaaaaaaaaaaaaaaaaaaaa

SEQ ID NO: 231 - DNA, 3240 bp, human
acgggcggtgtgtacaaagggcagggacttaatcaacgcaagcttatgacccgcactccttggcgcggggcggcgggccgggccaggccatgcgggccgagtgagccggcgcccgcagcccgcggcgcggcatggcttccccgcggagctccgggcagcccgggccgccgccgccgccgccaccgccgcccgcgcgcctgctactgctactgctgctgccgctgctgctgcctctggcgcccggggcctggggctgggcgcggggcgccccccggccgccgcccagcagcccgccgctctccatcatgggcctcatgccgctcaccaaggaggtggccaagggcagcatcgggcgcggtgtgctccccgccgtggaactggccatcgagcagatccgcaacgagtcactcctgcgcccctacttcctcgacctgcggctctatgacacggagtgcgacaacgcaaaagggttgaaagccttctacgatgcgataaaatacgggccgaaccacttgatggtgtttggaggcgtctgtccatccgtcacatccatcattgcagagtccctccaaggctggaatctggtgcagctttcttttgctgcaaccacgcctgttctagccgataagaaaaaatacccttatttctttcggaccgtcccatcagacaatgcggtgaatccagccattctgaagttgctcaagcactaccagtggaagcgcgtgggcacgctgacgcaagacgttcagaggttctctgaggtgcggaatgacctgactggagttctgtatggcgaggacattgagatttcagacaccgagagcttctccaacgatccctgtaccagtgtcaaaaagctgaaggggaatgatgtgcggatcatccttggccagtttgaccagaatatggcagcaaaagtgttctgttgtgcatacgaggagaacatgtatggtagtaaatatcagtggatcattccgggctggtacgagccttcttggtgggagcaggtgcacacggaagccaactcatcccgctgcctccggaagaatctgcttgctgccatggagggctacattggcgtggatttcgagcccctgagctccaagcagatcaagaccatctcaggaaagactccacagcagtatgagagagagtacaacaacaagcggtcaggcgtggggcccagcaagttccacgggtacgcctacgatggcatctgggtcatcgccaagacactgcagagggccatggagacactgcatgccagcagccggcaccagcggatccaggacttcaactacacggaccacacgctgggcaggatcatcctcaatgccatgaacgagaccaacttcttcggggtcacgggtcaagttgtattccggaatggggagagaatggagaccattaaatttactcaatttcaagacagcagggaggtgaaggtgggagagtacaacgctgtggccgacacactggagatcatcaatgacaccatcaggttccaagggtccgaaccaccaaaagacaagaccatcatcctggagcagctgcggaagatctccctacctctctacagcatcctctctgccctcaccatcctcgggatgatcatggccagtgcttttctcttcttcaacatcaagaaccggaatcagaagctcataaagatgtcgagtccatacatgaacaaccttatcatccttggagggatgctctcctatgcttccatatttctctttggccttgatggatcctttgtctctgaaaagacctttgaaacactttgcaccgtcaggacctggattctcaccgtgggctacacgaccgcttttggggccatgtttgcaaagacctggagagtccacgccatcttcaaaaatgtgaaaatgaagaagaagatcatcaaggaccagaaactgcttgtgatcgtggggggcatgctgctgatcgacctgtgtatcctgatctgctggcaggctgtggaccccctgcgaaggacagtggagaagtacagcatggagccggacccagcaggacgggatatctccatccgccctctcctggagcactgtgagaacacccatatgaccatctggcttggcatcgtctatgcctacaagggacttctcatgttgttcggttgtttcttagcttgggagacccgcaacgtcagcatccccgcactcaacgacagcaagtacatcgggatgagtgtctacaacgtggggatcatgtgcatcatcggggccgctgtctccttcctgacccgggaccagcccaatgtgcagttctgcatcgtggctctggtcatcatcttctgcagcaccatcaccctctgcctggtattcgtgccgaagctcatcaccctgagaacaaacccagatgcagcaacgcagaacaggcgattccagttcactcagaatcagaagaaagaagattctaaaacgtccacctcggtcaccagtgtgaaccaagccagcacatcccgcctggagggcctacagtcagaaaaccatcgcctgcgaatgaagatcacagagctggataaagacttggaagaggtcaccatgcagctgcaggacacaccagaaaagaccacctacattaaacagaaccactaccaagagctcaatgacatcctcaacctgggaaacttcactgagagcacagatggaggaaaggccattttaaaaaatcacctcgatcaaaatccccagctacagtggaacacaacagagccctctcgaacatgcaaagatcctatagaagatataaactctccagaacacatccagcgtcggctgtccctccagctccccatcctccaccacgcctacctcccatccatcggaggcgtggacgccagctgtgtcagcccctgcgtcagccccaccgccagcccccgccacagacatgtgccaccctccttccgagtcatggtctcgggcctgtaagggtgggaggcctggcccgggcctcccccgtgacagaaccacactgggcagaggggtctgctgcagaaacactgtcggctctggctgcggagaagctgggcaccatggctggcctctcaggaccactcggatggcactcaggtggacaggacggggcagggggagacttggcacctgacctcgagccttatttgtgaagtccttatttcttcacaaagaagaggaacggaaatgggacgtcttccttaacatctgcaaacaaggaggcgctgggatatcaaac

SEQ ID NO: 232 - DNA, 519 bp, human
atgaaggccactatcatcctccttctgcttgcacaagtttcctgggctggaccgtttcaacagagaggcttatttgactttatgctagaagatgaggcttctgggataggcccagaagttcctgatgaccgcgacttcgagccctccctaggcccagtgtgccccttccgctgtcaatgccatcttcgagtggtccagtgttctgatttgggtctggacaaagtgccaaaggatcttccccctgacacaactctgctagacctgcaaaacaacaaaataaccgaaatcaaagatggagactttaagaacctgaagaaccttcacgttgtctaccttcataacaacaatatctctgtagttggatcaagtgacttctgcccacctggacacaacaccaaaaaggcttcttattcgggtgtgagtcttttcagcaacccggtccagtactgggagatacagccatccaccttcagatgtgtctacgtgcgctctgccattcaactcggaaactataagtaa

SEQ ID NO: 233 - DNA, 3672 bp, human
acatgtgcatatttcattccccaggcagacattttttagaaatcaatacatgccccaatattggaaagacttgttcttccacggtgactacagtacatgctgaagcgtgccgtttcagccctcatttaattcaatttgtaagtagcgcacgagcctctgtgggggaggataggctgaaaaaaaaaagtgggctcgtatttatctacaggactccatatagtcatatataggcatataaatctatgctttttctttgtttttttctttcttcctttctttcaaaggtttgcattaacttttcaaagtagttcctataggggcattgaggagcttcctcattctgggaaaactgagaaaacccatattctcctaatacaacccgtaatagcatttttgcctgcctcgaggcagagtttcccgtgagcaataaactcagcttttttgtggggcacagtactggatttgacagtgattccccacgtgtgttcatctgcacccaccgagccaggcagaggccagccctccgtggtgcacacagcacgcgcctcagtccatcccattttagtctttaaaccctcaggaagtcacagtctccggacaccacaccacattgagcccaacaggtccacgatggatccacctagtcccaccccagcctttttctttcatctgaacagaatgtgcatttttggaagcctccctcactctccatgctggcagagcaggagggagactgaagtaagagatggcagagggagatggtggcaaaaaggtttagatgcaggagaacagtaagatggatggttccggccagagtcgatgtggggaggaacagagggctgaagggagagggggctgactgttccattctagctttggcacaaagcagcagaaagggggaaaagccaatagaaatttccttagcttccccaccatatgtattttcatggatttgagaggaaagagaggaaaatgggggaatgggttgcaaaatagaaatgagcttaatccaggccgcagagccagggaaggtgagtaaccttaggagggtgctagactttagaagccagataggaagaatcagtctaaactggccatgctttggaagggacaagactatgtgctccgctgcccaccttcagcctgcaatgagggactgaggcccacgagtctttccagctcttcctccattctggccagtccctgcatcctccctggggtggaggatggaaggaaagctgggacaagcagggaacgcatgattcagggatgctgtcactcggcagccagattccgaaactcccattctccaatgacttcctcaaccaatgggtggccttgtgactgttctttaaggctgaagatatccaggaaagggggcttggacactggccaaggagaccccttcgtgctgtggacacagctctcttcactctttgctcatggcatgacacagcggagaccgcctccaacaacgaatttggggctacgaagaggaatagcgaaaaagcaaatctgtttcaactgatgggaaccctatagctatagaacttgggggctatctcctatgcccctggacaggacagttggctggggacaggagaagtgctcaatcttcatgagacaaaggggcccgatcaaggcagccacaaggccttgacctgccgagtcagcatgccccatctctctcgacagctgtcccctaaacccaactcacgtttctgtatgtcttaggccagtatcccaaacctcttccacgtcactgttctttccacccattctccctttgcatcttgagcagttatccaactaggatctgccaagtggatactggggtgccactcccctgagaaaagactgagccaggaactacaagctccccccacattcctcccagcctggacctaattcttgagaggggctctctcttcacggactgtgtctggactttgagcaggcttctgccccttgcgttggctctttgctgccagccatcaggtgggggattagagcctggtgtaagtgcgccagactcttccggtttccaaagttcgtgcctgcgaacccaaacctgtgagtctcttctgcatgcaggagtttctcctgggcagctggtcactccccagagaagctgggccttcatggacacatggaactaagcctcccaaatgggagttctggctgagcccagggtggggagatcctgggaagggaggcactggaggaagacggcacctcttcccccatggcagggtgtgagggaggcaggtttggaatggtgcgagtatggcaatctaagcaggggtctggtctctttgactccaggctcgctttggccgactgtctgctcacccagagaccttggactccggactatccatggctccgaatctaagtgctgcccactcccatgctcacacccacagaaggtcttcccatcccctttagattcgtgcctcactccaccagtgaggaagatgcctctgtctttcccacgactgccaggagatagggaagcccagccaggactgaccctccttcctccagcctgccctgacccacctggcaaagcagggcacatggggaggaagagactggaacctttctttgacagccaggcctagacagacaggcctggggacactggcccatgaggggaggaaggcaggcgcacgaggtccagggaggcccttttctgatcatgccccttctctcccaccccatctccccaccaccacctctgtggcctccatggtacccccacagggctggcctcccctagagggtgggcctcaaccacctcgtcccgccacgcaccggttagtgagacagggctgccacgcaaccgccaagcccccctcaaggtgggacagtaccccggacccatccactcactcctgagaggctccggcccagaatgggaacctcagagaagagctctaaggagaagaaaccccatagcgtcagagaggatatgtctggcttccaagagaaaggaggctccgttttgcaaagtggaggagggacgagggacaggggtttcaccagccagcaacctgggccttgtactgtctgtgtttttaaaaccactaaagtgcaagaattacattgcactgtttctccactttttattttctcttaggcttttgtttctatttcaaacatactttcttggttttctaatggagtatatagtttagtcatttcacagactctggcctcctctcctgaaatccttttggatggggaaagggaaggtggggagggtccgaggggaaggggaccccagcttccctgtgcccgctcaccccactccaccagtccccggtcgccagccggagtctcctctctaccgccactgtcacaccgtagcccacatggatagcacagttgtcagacaagattccttcagattccgagttgctaccggttgttttcgttgttgttgttgttgtttttctttttctttttttttttgaagacagcaataaccacagtacatattactgtagttctctatagttttacatacattcataccataactctgttctctcctcttttttgttttcaactttaaaaacaaaaataaacgatgataatctttactggtgaaaaggatggaaaaataaatcaacaaatgcaaccagtttgtgagaaaaaaaaaaaaaa

SEQ ID NO: 234 - DNA, 3090 bp, human
tttaaaggcagccgaggggaccctgggcccccaggaccacctcctgtcatcctgccaggaatgaaagacattaaaggagagaaaggagatgaagggcctatggggctgaaaggatacctgggcgcaaaaggtatccaaggaatgccaggcatcccagggctgtcaggaatccctgggctgcctgggaggcccggccacatcaaaggagtcaagggagacatcggagtccccggcatccccggtttgccaggattccctggggtggctggcccccctggaattacgggattcccaggattcataggaagccggggtgacaaaggtgccccagggagagcaggcctgtatggcgagattggcgcgactggtgatttcggtgacatcggggacactataaatttaccaggaagaccaggcctgaagggggagcggggcaccactggaataccaggtctgaagggattctttggagagaagggaacagaaggtgacatcggcttccctgggataacaggcgtgactggagtccaaggccctcctggacttaaaggacaaacaggctttccagggctgactgggcctccagggtcgcagggagagctggggcggattggactgcctggtggcaaaggagatgatggctggccgggagctccgggcttaccaggttttccgggactccgtgggatccgcggcttacacggcttgccaggcaccaagggctttccaggatccccaggttctgacatccacggagacccaggcttcccaggccctcctggggaaagaggtgacccaggagaggccaacacccttccaggccctgtgggagtcccaggacagaaaggagaccaaggagctccaggggaacgaggcccacctgggagcccaggacttcaggggttcccaggcatcacacccccttccaacatctctggggcacctggtgacaaaggggcgccagggatatttggcctgaaaggttatcggggcccaccagggccaccaggttctgctgctcttcctggaagcaaaggtgacacagggaacccaggagctccaggaaccccagggaccaaaggatgggccggggactccgggccccagggcaggcctggtgtgtttggtctcccaggagaaaaagggcccaggggtgaacaaggcttcatggggaacactggacccaccggggcagtgggcgacagaggccccaagggacccaagggagacccaggattccctggtgcccccgggactgtgggagcccccgggattgcaggaatcccccagaagattgccgtccaaccagggacagtgggtccccaggggaggcgaggcccccctggggcaccgggggagatggggccccagggcccccccggagaaccaggttttcgtggggctccagggaaagctgggccccaaggaagaggtggtgtgtctgctgttcccggcttccggggagatgaaggacccataggccaccaggggccgattggccaagaaggtgcaccaggccgtccagggagcccgggcctgccgggtatgccaggccgcagcgtcagcatcggctacctcctggtgaagcacagccagacggaccaggagcccatgtgcccggtgggcatgaacaaactctggagtggatacagcctgctgtacttcgagggccaggagaaggcgcacaaccaggacctggggctggcgggctctgcctggcgcggttcagcaccatgcccttcctgtactgcaaccctggtgatgtctgctactatgccagccggaacgacaagtcctactggctctctaccactgcgccgctgcccatgatgcccgtggccgaggacgagatcaagccctacatcagccgctgttctgtgtgtgaggccccggccatcgccatcgcggtccacagtcaggatgtctccatcccacactgcccagctgggtggcggagtttgtggatcggatattccttcctcatgcacacggcggcgggagacgaaggcggtggccaatcactggtgtcaccgggcagctgtctagaggacttccgcgccacaccattcatcgaatgcaatggaggccgcggcacctgccactactacgccaacaagtacagcttctggctgaccaccattcccgagcagagcttccagggctcgccctccgccgacacgctcaaggccggcctcatccgcacacacatcagccgctgccaggtgtgcatgaagaacctgtgagccggcgcgtgccaggaagggccattttggtgcttattcttaacttattacctcaggtgccaacccaaaaattggctttatttttttcttaaaaaaaaaagtctaccaaaggaatttgcatccagcagcagcacttagacctgccagccactgtcaccgagcgggtgcaagcactcggggtccctggagggcaagccctgcccacagaaagccaggagcagccctggcccccatcagccctgctagacgcaccgcctgaaggcacagctaaccacttcgcacacacccatgtaaccactgcactttccaatgccacagacaactcacattgttcaactcccttctcggggtgggacagacgagacaacagcacacaggcagccagccgtggccagaggctcgaggggctcaggggctcaggcacccgtccccacacgagggccccgtgggtgggcctggccctgctttctacgccaatgttatgccagctccatgttctcccaaataccgttgatgtgaattattttaaaggcaaaaccgtgctctttattttagaaaacactgataatcacactgcggtaggtcattcttttgccacatccctatagaccactgggtttggcaaaactcaggcagaagtggagacccttctagacatcactgtcagccttgctacttgaaggtacaccccatagggtcggaggtgctgtccccactgccccacgttgtccctgagatttaacccctccactgctgggggtgagctgtactcttctgactgccccctcctgtgtaacgactacaaaataaaacttggttctgaatatttttaaaaaaaaaaaaaaaa

SEQ ID NO: 235 - DNA, 857 bp, human
atcaacaactggtcagttgttttttgtttttytcttttccacactgctctctggattcgaacctagtgaattctgggctcagwmctcctcctccatctctttcttgatccaatccacgtagttgagcactttggtdtagaagccatarcccctdcwgcacccgawgccccaggacacgatgcccgttgccacccagcgatcagtgttcgggtcccttactgcaaaamcgcccccactatccccctggcaggcgtcctgctttagagatgggtgtccagcacagaacatgttttgasagaacacatccatcctattcyttccccggcgcccagtcctcacagcgcctgtgcgmttagctacgggcagacggacaaacctgaggtcatgtkcyatcttctkbtscatgaccccgaagccactgacatagcccatcaagcccatggtcgtagaaggkatgcgttgtgggggaggcagagggggaggaggttgggacccagggtgacactattttccagctccagcagggcgatgtccccctcaaaattgtaggactcatcctgacggtagtccgggtggacgctgaccctgcggatggggtgatttcctagcttcatgagctcttccacatttgtgtggcccaggaacacatccaaagaggcgttgctttgcgcttcgtgttccttgggatacagggtgtgggcagctgtgaggatccagcggtcgcccagcagggccccgcccccgcgcccgtggatgttggtgaacacctgccaggggaagttgcccatcttgggctttttgccctccgatgatgcgcwgcctctgttccacggggttcacgggcttcccacacactg

SEQ ID NO: 236 - DNA, 820 bp, human
cccggcatcatcacgaggcgcttcacccaacagatccacttctgtgtccagtcaggctgcgcaggcggcctccccacaggtccctgccaccaccacacccaagattctccatcctttaacacgcaattatggtaaaccatggttgacaaacagcaaaatgtcaactccttgtaaagcagcagagtgctcagactttcccgtgccatctgcagagggaacgccaatacaaggaagcaagcttcgacttccaggatatttatcagggaaaggcttccactctggggaggacagtggcttgataacaactgcagctgccagagtccgaacacagtttgctgattccaagaaagaattcccagccgaccaggaagtcgagctggaagcaaagctggcagcagggccagcagccgccgaggcagtgatgcatcagactttgacatttcagaaatccagtccgtgtgctcagatgtggaaactgtcccccagacacacagacctacaccccgagcaggttctcggcatccacagcgaagccttcaaaaatccccacgccccagaggaaatcacctgccagcaaattggacaagtcctcaaagagatagtgcaattggttctaccaaggccttccttgagcatttattatttaaagtttgaacgatggtaaatatggtgtagaaaattcttgtgaaatattgcaagaggcgagtttaaaaattctgagatggcttattgtgtatagccttattatctgtataatattgcaaatatctggggtaaagtcccttatttgtgagggagaacgttaacatgacttacattt

SEQ ID NO: 237 - DNA, 922 bp, human
taggcccccaaaatgatcgtagtacatgccagtcatttctcagtgaaataaatacaataccagagtacattatgggttttattgctttcttttatggtagacctgttaatggggaaaaaatacatcaaatcaaatagaatcttatatctgtatgttaaaatagagcacttacctgaagtcagtggcctggatcatagccctggatcatttcccagtctgtcctgtgctgtgtgaccttggacaaggcgcttcatctctctgggcctctatttctccatttgtaaaacaagtggctgcagtagatgatggctgagagcccttcctgttcccagatgccttggtccaaagaccccacccctctgctggtcctgccaacgtgttggtgctataagctgcttcagatataaaattggtttatctataatgtttgttcatttaatagcttctaaaaggccttttgttatacagtgctttttttctagttttatggacttgattactgtaataatgtcttgtttttagccatgtaactacaaacagatattctcttgatgtcttagtaaatttgcatttgatatatcattgatgagatttgtgtatgtatattctttggctacgcatctgtccagcatcttataaccataatactgtgatcattcattttggaaatatgtcctatggaaagaataaaagcatgtacttcacagtagcatgttccacagatttgcacgagttcattaaaagccccttgctttctgaacaaaaaaaagggggcggtcaaagttcccgaggcccagttagcgtcccggttttgcaaagggccttaggacgttaagagacgcgggtacacctgggaagggtgggtgggaccccggtggacggacccgagaccggaaggtaggggtgtcggggtcgtaacggg

SEQ ID NO: 238 - DNA, 1871 bp, human
caagaaaagggaatatagaacttgcctcatcagaaccacagcattttacaacaactgtgactcgatgcagcccgaccgtggcctttgtggaatttccctccagcccccagctgaagaatgatgtgtcggaagaaaaagaccagaagaaaccagaaaatgaaatgagtggaaaggtggagttggtgctgtcacaaaaggtggtaatgccaaaatctccagaacccgaagcaacgctgacatttccatttctggacaaaatgcctgaagccaaccaactacatttgccaaatctcaattctcaagtggattctccaagcagtgagaagtcacctgttatgacaccttttaagttctgggcatgggacccagaagaggagcgcaggcgacaggaaaaatggtatcaggaacaggaacgtttgctccaggagagataccagaagagcaggacaagctgaaagaagagtgggaaaaggcccaaaaggaggtggaagaggaagaacgcagatactatgaggaggagcgtaagataattgaagacactgtggttccatttactgtttcttcaagttccgctgaccagctgtctacctcttcctccatgactgaaggcagtgggacaatgaatttttatagacctgggaaactgtcaagatgaaaaacaagacagaagatggaagaaatcattccagggagatgacagtgacttattgctgaagactagggaaagtgatcgactggaggagaagggcagcctaactgaaggggccttggctcattctgggaaccctgtatcaaaaggagtccatgaagaccatcagctggataccgaggctggggccccacactgtggaacaaacccacagcttgctcaggatccatcccagaatcagcagacatcaaatccaacgcacagttcagaagatgtgaagccaaaaaccctcccgctggataaaagcattaaccatcagatcgagtctcccagtgaaaggcggaagtctataagtggaaagaagctgtgctcttcctgtgggcttcctttgggtaaaggagctgcaatgatcatcgagaccctcaatctctattttcacatccagtgtttcaggtgtggaatttgtaaaggccagcttggagatgcagtgagtgggacggatgttaggattcgaaatggtctcctgaactgtaatgattgctacatgcgatccagaagtgccgggcagcctacaacattgtgacacggctttcaagcttccggatcactcaccatttctttactgagagtgtcccctggcaactgcttaacaaaatcccaagctcaggggcttctcagcatttacctaatttctgaaaggctcttctgaaaggtggtatctgttctttcgtagcacagtgtttatgtttttcctgtttattgttttggtttttttttttttttgcatttgcacagtatacacaaaagaatatggggttgtaatgatcctgaatagctcaaaaaaggttttagcatggtcaaacaggcttatggtttaaaatgtgttattctcttctttgggaattagctaaatgatgcattaaacctgttttgttttagaatgtctaggaattaaacactttatgtttacagaattgagctgcagaaagtgcaagacatgccaatttgagacacacggtcttctaagactgaaggataaatttaatgcatttcagaaactaaacatcacagcaagctctatctctgagctataatttgtttttaatgcaaagacactagtttgataatatatactgtaatcctgaaacatttgtgttacttacctttggaggtagaaattataccaataaattattgcaccgttaaaaaaaaaaaaaaaaaa

SEQ ID NO: 239 - DNA, 489 bp, human
tttttgttggtggctgtgattacctttattagtttacaaataaaaaagttaaaaagaaatactgtgtttagggtaaggtaacagtttcatctaatcagaggagagtgaagaggaggcgctgccttctaggtgctgtgacttctccttttcgtgattcttctccaccttggtcaacatcttccccgctatgctggaattacttcggtgttctgcggtggccatggtgaacatctgatgaactgaaattccatcggaatgcacaggaagatatagttgatcttcaaaaatgtcctttccaggaccaccatactggggaagttctttcgggtgcctgcgaatgggctgcagcctggggctgggcccgagctctagctctgtcatgccatcgccactgaaatcggtttccagatgattagtctcttcatgccccgtccatttttcggtttttctccagtgttcagaattcaaatgattaacttctggaatgtc

SEQ ID NO: 240 - DNA, 489 bp, human; identical to SEQ ID NO: 239

SEQ ID NO: 241 - DNA, 489 bp, human; identical to SEQ ID NO: 239

SEQ ID NO: 242 - DNA, 7680 bp, human
gaagagcaagaggcaggctcagcaaatggttcagccccagtccccggtggctgtcagtcaaagcaagcccggttgttatgacaatggaaaacactatcagataaatcaacagtgggagcggacctacctaggtaatgtgttggtttgtacttgttatggaggaagccgaggttttaactgcgaaagtaaacctgaagctgaagagacttgctttgacaagtacactgggaacacttaccgagtgggtgacacttatgagcgtcctaaagactccatgatctgggactgtacctgcatcggggctgggcgagggagaataagctgtaccatcgcaaaccgctgccatgaagggggtcagtcctacaagattggtgacacctggaggagaccacatgagactggtggttacatgttagagtgtgtgtgtcttggtaatggaaaaggagaatggacctgcaagcccatagctgagaagtgttttgatcatgctgctgggacttcctatgtggtcggagaaacgtgggagaagccctaccaaggctggatgatggtagattgtacttgcctgggagaaggcagcggacgcatcacttgcacttctagaaatagatgcaacgatcaggacacaaggacatcctatagaattggagacacctggagcaagaaggataatcgaggaaacctgctccagtgcatctgcacaggcaacggccgaggagagtggaagtgtgagaggcacacctctgtgcagaccacatcgagcggatctggccccttcaccgatgttcgtgcagctgtttaccaaccgcagcctcacccccagcctcctccctatggccactgtgtcacagacagtggtgtggtctactctgtggggatgcagtggttgaagacacaaggaaataagcaaatgctttgcacgtgcctgggcaacggagtcagctgccaagagacagctgtaacccagacttacggtggcaacttaaatggagagccatgtgtcttaccattcacctacaatggcaggacgttctactcctgcaccacggaagggcgacaggacggacatctttggtgcagcacaacttcgaattatgagcaggaccagaaatactctttctgcacagaccacactgttttggttcagactcaaggaggaaattccaatggtgccttgtgccacttccccttcctatacaacaaccacaattacactgattgcacttctgagggcagaagagacaacatgaagtggtgtgggaccacacagaactatgatgccgaccagaagtttgggttctgccccatggctgcccacgaggaaatctgcacaaccaatgaaggggtcatgtaccgcattggagatcagtgggataagcagcatgacatgggtcacatgatgaggtgcacgtgtgttgggaatggtcgtggggaatggacatgcattgcctactcgcaacttcgagatcagtgcattgttgatgacatcacttacaatgtgaacgacacattccacaagcgtcatgaagaggggcacatgctgaactgtacatgcttcggtcagggtcggggcaggtggaagtgtgatcccgtcgaccaatgccaggattcagagactgggacgttttatcaaattggagattcatgggagaagtatgtgcatggtgtcagataccagtgctactgctatggccgtggcattggggagtggcattgccaacctttacagacctatccaagctcaagtggtcctgtcgaagtatttatcactgagactccgagtcagcccaactcccaccccatccagtggaatgcaccacagccatctcacatttccaagtacattctcaggtggagacctaaaaattctgtaggccgttggaaggaagctaccataccaggccacttaaactcctacaccatcaaaggcctgaagcctggtgtggtatacgagggccagctcatcagcatccagcagtacggccaccaagaagtgactcgctttgacttcaccaccaccagcaccagcacacctgtgaccagcaacaccgtgacaggagagacgactcccttttctcctcttgtggccacttctgaatctgtgaccgaaatcacagccagtagctttgtggtctcctgggtctcagcttccgacaccgtgtcgggattccgggtggaatatgagctgagtgaggagggagatgagccacagtacctggatcttccaagcacagccacttctgtgaacatccctgacctgcttcctggccgaaaatacattgtaaatgtctatcagatatctgaggatggggagcagagtttgatcctgtctacttcacaaacaacagcgcctgatgcccctcctgacccgactgtggaccaagttgatgacacctcaattgttgttcgctggagcagaccccaggctcccatcacagggtacagaatagtctattcgccatcagtagaaggtagcagcacagaactcaaccttcctgaaactgcaaactccgtcaccctcagtgacttgcaacctggtgttcagtataacatcactatctatgctgtggaagaaaatcaagaaagtacacctgttgtcattcaacaagaaaccactggcaccccacgctcagatacagtgccctctcccagggacctgcagtttgtggaagtgacagacgtgaaggtcaccatcatgtggacaccgcctgagagtgcagtgaccggctaccgtgtggatgtgatccccgtcaacctgcctggcgagcacgggcagaggctgcccatcagcaggaacacctttgcagaagtcaccgggctgtcccctggggtcacctattacttcaaagtctttgcagtgagccatgggagggagagcaagcctctgactgctcaacagacaaccaaactggatgctcccactaacctccagtttgtcaatgaaactgattctactgtcctggtgagatggactccacctcgggcccagataacaggataccgactgaccgtgggccttacccgaagaggccagcccaggcagtacaatgtgggtccctctgtctccaagtaccccctgaggaatctgcagcctgcatctgagtacaccgtatccctcgtggccataaagggcaaccaagagagccccaaagccactggagtctttaccacactgcagcctgggagctctattccaccttacaacaccgaggtgactgagaccaccatcgtgatcacatggacgcctgctccaagaattggttttaagctgggtgtacgaccaagccagggaggagaggcaccacgagaagtgacttcagactcaggaagcatcgttgtgtccggcttgactccaggagtagaatacgtctacaccatccaagtcctgagagatggacaggaaagagatgcgccaattgtaaacaaagtggtgacaccattgtctccaccaacaaacttgcatctggaggcaaaccctgacactggagtgctcacagtctcctgggagaggagcaccaccccagacattactggttatagaattaccacaacccctacaaacggccagcagggaaattctttggaagaagtggtccatgctgatcagagctcctgcacttttgataacctgagtcccggcctggagtacaatgtcagtgtttacactgtcaaggatgacaaggaaagtgtccctatctctgataccatcatcccagctgttcctcctcccactgacctgcgattcaccaacattggtccagacaccatgcgtgtcacctgggctccacccccatccattgatttaaccaacttcctggtgcgttactcacctgtgaaaaatgaggaagatgttgcagagttgtcaatttctccttcagacaatgcagtggtcttaacaaatctcctgcctggtacagaatatgtagtgagtgtctccagtgtctacgaacaacatgagagcacacctcttagaggaagacagaaaacaggtcttgattccccaactggcattgacttttctgatattactgccaactcttttactgtgcactggattgctcctcgagccaccatcactggctacaggatccgccatcatcccgagcacttcagtgggagacctcgagaagatcgggtgccccactctcggaattccatcaccctcaccaacctcactccaggcacagagtatgtggtcagcatcgttgctcttaatggcagagaggaaagtcccttattgattggccaacaatcaacagtttctgatgttccgagggacctggaagttgttgctgcgacccccaccagcctactgatcagctgggatgctcctgctgtcacagtgagatattacaggatcacttacggagaaacaggaggaaatagccctgtccaggagttcactgtgcctgggagcaagtctacagctaccatcagcggccttaaacctggagttgattataccatcactgtgtatgctgtcactggccgtggagacagccccgcaagcagcaagccaatttccattaattaccgaacagaaattgacaaaccatcccagatgcaagtgaccgatgttcaggacaacagcattagtgtcaagtggctgccttcaagttcccctgttactggttacagagtaaccaccactcccaaaaatggaccaggaccaacaaaaactaaaactgcaggtccagatcaaacagaaatgactattgaaggcttgcagcccacagtggagtatgtggttagtgtctatgctcagaatccaagcggagagagtcagcctctggttcagactgcagtaaccaacattgatcgccctaaaggactggcattcactgatgtggatgtcgattccatcaaaattgcttgggaaagcccacaggggcaagtttccaggtacagggtgacctactcgagccctgaggatggaatccatgagctattccctgcacctgatggtgaagaagacactgcagagctgcaaggcctcagaccgggttctgagtacacagtcagtgtggttgccttgcacgatgatatggagagccagcccctgattggaacccagtccacagctattcctgcaccaactgacctgaagttcactcaggtcacacccacaagcctgagcgcccagtggacaccacccaatgttcagctcactggatatcgagtgcgggtgacccccaaggagaagaccggaccaatgaaagaaatcaaccttgctcctgacagctcatccgtggttgtatcaggacttatggtggccaccaaatatgaagtgagtgtctatgctcttaaggacactttgacaagcagaccagctcagggtgttgtcaccactctggagaatgtcagcccaccaagaagggctcgtgtgacagatgctactgagaccaccatcaccattagctggagaaccaagactgagacgatcactggcttccaagttgatgccgttccagccaatggccagactccaatccagagaaccatcaagccagatgtcagaagctacaccatcacaggtttacaaccaggcactgactacaagatctacctgtacaccttgaatgacaatgctcggagctcccctgtggtcatcgacgcctccactgccattgatgcaccatccaacctgcgtttcctggccaccacacccaattccttgctggtatcatggcagccgccacgtgccaggattaccggctacatcatcaagtatgagaagcctgggtctcctcccagagaagtggtccctcggccccgccctggtgtcacagaggctactattactggcctggaaccgggaaccgaatatacaatttatgtcattgccctgaagaataatcagaagagcgagcccctgattggaaggaaaaagacagacgagcttccccaactggtaacccttccacaccccaatcttcatggaccagagatcttggatgttccttccacagttcaaaagacccctttcgtcacccaccctgggtatgacactggaaatggtattcagcttcctggcacttctggtcagcaacccagtgttgggcaacaaatgatctttgaggaacatggttttaggcggaccacaccgcccacaacggccacccccataaggcataggccaagaccatacccgccgaatgtaggacaagaagctctctctcagacaaccatctcatgggccccattccaggacacttctgagtacatcatttcatgtcatcctgttggcactgatgaagaacccttacagttcagggttcctggaacttctaccagtgccactctgacaggcctcaccagaggtgccacctacaacatcatagtggaggcactgaaagaccagcagaggcataaggttcgggaagaggttgttaccgtgggcaactctgtcaacgaaggcttgaaccaacctacggatgactcgtgctttgacccctacacagtttcccattatgccgttggagatgagtgggaacgaatgtctgaatcaggctttaaactgttgtgccagtgcttaggctttggaagtggtcatttcagatgtgattcatctagatggtgccatgacaatggtgtgaactacaagattggagagaagtgggaccgtcagggagaaaatggccagatgatgagctgcacatgtcttgggaacggaaaaggagaattcaagtgtgaccctcatgaggcaacgtgttacgatgatgggaagacataccacgtaggagaacagtggcagaaggaatatctcggtgccatttgctcctgcacatgctttggaggccagcggggctggcgctgtgacaactgccgcagacctgggggtgaacccagtcccgaaggcactactggccagtcctacaaccagtattctcagagataccatcagagaacaaacactaatgttaattgcccaattgagtgcttcatgcctttagatgtacaggctgacagagaagattcccgagagtaaatcatctttccaatccagaggaacaagcatgtctctctgccaagatccatctaaactggagtgatgttagcagacccagcttagagttcttctttctttcttaagccctttgctctggaggaagttctccagcttcagctcaactcacagcttctccaagcatcaccctgggagtttcctgagggttttctcataaatgagggctgcacattgcctgttctgcttcgaagtattcaataccgctcagtattttaaatgaagtgattctaagatttggtttgggatcaataggaaagcatatgcagccaaccaagatgcaaatgttttgaaatgatatgaccaaaattttaagtaggaaagtcacccaaacacttctgctttcacttaagtgtctggcccgcaatactgtaggaacaagcatgatcttgttactgtgatattttaaatatccacagtactcactttttccaaatgatcctagtaattgcctagaaatatctttctcttacctgttatttatcaatttttcccagtatttttatacggaaaaaattgtattgaaaacacttagtatgcagttgataagaggaatttggtataattatggtgggtgattattttttatactgtatgtgccaaagctttactactgtggaaagacaactgttttaataaaagatttacattccaca

SEQ ID NO: 243 - DNA, 572 bp, human
catggttacttttttatttgaagaaaaaaaaaagtatgttttaataaatactgcggaaacattgaccaaacaaacatacacagtgacttcaacagtttaaaaaatgcaacaaaagttctgctttataacagttataacttattttctttttacaatatttaaatacagaaagcactcgccagctattttgtaatactgcccaaagcataatgctgcatcaatcaaagcatattatgttggtaaaatgtctgtattttatgggaaatgactggaatcgaattttcttgcagagacaagacaaagtgcttgtaagacatagaactgagtgttgtaattaccttaatctctcctgccacgatttaaggggagcacagcttcaacacttcaaaaacgaagcactatcatgggaaagaaagctcgttttcaacaagcgccaacaataaacaggtcagatctggtttcttctctgaaagaatctctaaaaggaactggtcaaaaatatctgtaaactattttaaatgcttattattttacgtaacaacagagaccaagtgctgaacacagaccttggc

SEQ ID NO: 244 - DNA, 699 bp, human
  misc_feature (699)..(699): n is a, c, g, or t
aagatttgggttcctaaggggccaagcgttttacaccagtggtgattaactcaactaaaacccactgtaggaagttagcttccccagacagctaatgccgagatcttctaccagcgtagagttgacagaagcaggccagcgaggaggtgtgggacataatagcctgagtgcttgggttaccatggagactggagtgtgtgaggccacagcctgtgctaaagagccatggagccctcccctggccatgtctggggacagatagaacctgttgggggaaatattccctcaccccagggttctttctgcagagcaagggttgcctttgtcctatccctgagcttgctcaacaagagaaacaaggtttcttaagtgttttggttaaagttttcattcttatttgactatgtatatgtaattgtaaagaaacgatcctatgcattgtctttcttttatattcttgtaatattctgaaattaaaattgttttgtttctaaaaaaaaaaaaaaaacaacaaaaaaaaaacttgtcggccgcctcggcccagtcgactctagactcgagcaagcttatgcatgcggccgcatttcgagctcacttggccaattcgccctatagtgagtcgtattacaattcactggccgtcgttttacaacgtcgtgactgggagctggcgtattagcgaagaagcccggcaccgtn

SEQ ID NO: 245 - DNA, 617 bp, human
  misc_feature (569)..(569): n is a, c, g, or t
ttttttttttttatttgcatgtttattggtttaacacaggggtcgcaaactcaaatgcccacaggggccaggttaggttagcggctgaagcagtctggggagaggcaaaaagcaatggcagggaggtgggacagaggaatgtgggccccaaactatgggggcagctgctactcagtgccagctgttcgtcgccatggggggaagcgggaccagagccgccgggtcttcggctttttcaagaggacgcataactccggattgttatttgaactgtcctgactttggtaagactctgtgacggtgacagtgaaggaggccgactcatcgtcaatttcacacaagtactcgccggagtcctcgagctggacagcgggcagcaccaggcggcggacagtgtcttccttctgcaggagcagcgcggggctctccaccacctcctctccatccttggtccagcgcacctctgcccagggccggcatagctcacaggtcagcaccacacgctccaggcgcacggctgccacatacaccttgccgctgggatacacgatccacgaggagacgtctgngatggtgacagtgaagtaggcacactcatctccagcgacgcactgaaa

SEQ ID NO: 246 - DNA, 594 bp, human
gaggacacaaggagggtgcgtggtgccctcaccctgggccaggagcgagggggcaaggactctgcctccagggcatctggggttttcccctccctcacacaacacactcccattctctttaggtttgcaccagtggtgtgagcagttggactcagttggacaagggggaaagggggacttccctgggaaggtccagctaaaagtggcaacatttgcccccagaatgggggcctgggaacactggacctgctccttctcccctctccttccccgttttgtgcttctggttgtttctttaattaatttaacaagtgctgcagttgccctcccattcccatctatcccccaagtcctttgcaatttcttccctgccctacataggggcggtgggtgtgggatcccttcactggccccctcgggaggcctgggttggactcagggtctcctccagctgggggctggaccgcagcacctatctgagcagttagagcgtctttcttttcagatgtgtacagtagattatttatttgttattttggaatacaatttattttatggcttaggaaacaaacacaacatcaacacacacaaagg

SEQ ID NO: 247 - DNA, 5654 bp, human
gctttgtttgatggtgatccacatttatccacagagaatcctgccttggttcctgatgctttgctagcctcagacacttgtctggatataagcgaagctgcctttgaccacagtttcagcgatgcctcaggtctcaacacatccacgggaacaatagatgacatgagtaaactgacattatccgaaggccatccggaaacgccagttgatggggacctagggaagcaagatatctgctcatctgaagcctcgtggggtgattttgaatatgatgtaatgggccagaatatcgatgaagatttactgagagagcctgaacacttcctgtatggtggtgaccctcctttggaggaagattctctgaagcagtcgctggcaccgtacacacctccctttgatttgtcttatctcacagaacctgcccagagtgctgaaacaatagaggaagctgggtctccagaggatgaatctctgggatgcagagcagcagagatagtgctttctgcacttcctgatcgaagaagtgagggaaaccaggctgagaccaaaaacagactgcctggatcccagctggctgtgctgcatattcgtgaagaccctgagtccgtttatttgccggtaggagcaggctccaacattttgtctccatcaaacgttgactgggaagtagaaacagataattctgatttaccagcaggtggagacataggaccaccaaatggtgccagcaaggaaataccagaattggaagaagaaaaaacaattcctaccaaagagcctgagcagataaaatcagaatacaaggaagaaagatgcacagagaagaatgaagatcgtcatgcactacacatggattacatacttgtaaaccgtgaagaaaattcacactcaaagccagagacctgtgaagaaagagaaagcatagctgaattagaattgtatgtaggttccaaagaaacagggctgcagggaactcagttagcaagcttcccagacacatgtcagccagcctccttaaatgaaagaaaaggtctctctgcagagaaaatgtcttctaaaggcgatacgagatcatcttttgaaagccctgcacaagaccagagttggatgttcttgggccatagtgaggttggtgatccatcactggatgccagggactcagggcctgggtggtctggcaagactgtggagccgttctctgaactcggcttgggtgagggtccccagctgcagattctggaagaaatgaagcctctagaatctttagcactagaggaagcctctggtccagtcagccaatcacagaagagtaagagccgaggcagggctggcccggatgcagttacccatgacagtgaatgggaaatgctttcaccacagcctgttcagaaaaacatgatctctgacacggaaatggaggaggagacagagttccttgagctcggaaccaggatatcaagaccaaatggactactgtcagaggatgtaggaatggacatcccctttgaagagggcgtgctgagtcccagtgctgcagacatgaggcctgaacctcctaattctctggatcttaatgacactcatcctcggagaatcaagctcacagccccaaatatcaatctttctctggaccaaagtgaaggatctattctctctgatgataacttggacagtccagatgaaattgacatcaatgtggatgaacttgatacccccgatgaagcagattcttttgagtacactggccatgatcccacagccaacaaagattctggccaagagtcagagtctattccagaatatacggccgaagaggaacgggaggacaaccggctttggaggacagtggtcattggagaacaagagcagcgcattgacatgaaggtcatcgagccctacaggagagtcatttctcacggaggatactatggggacggtctaaatgccatcattgtgtttgccgcctgttttctgccagacagcagtcgggcggattaccactatgtcatggaaaatcttttcctatatgtaataagtactttagagttgatggtagctgaagactatatgattgtgtacttgaatggtgcaacccccaagaaggaggatgccagggctaggctggatgaagaaatgctaccagatgattgacagacggttgaggaagaatttgaaatcattcatcattgttcatccatcttggttcatcagaacaatccttgctgtgacacgaccttttataagttcaaaattcagcagtaaaattaaatatgtcaatagcttatcagaactcagtgggctgatcccaatggattgcatccacattccagagagcatcatcaaactggatgaagaactgagggaagcatcagaggcagctaaaactagctgcctttacaatgatccagaaatgtcttctatggagaaggatattgacttgaagctgaaagaaaagccttagttggccatgctggaagaagaggatgcttttctggttcatggttctgttgaaacatatctacctgaaagagacagggctgatgttacctttttccactttgcactacctggtgccattctaaatttctaaggggaaaaatagaaagtttgtttactcttaagatattttatgaaattgtgtgtactttcctattttgccaattatgtgcctcaaagattttagttgagccttagcaagaaagtaggaccttccatttcaatacttcattaacacggtgtagtgatactttgtcccttagactggtgtttaccagtaagatacctttaatccactgttaagtatgagtggatttgtttccatagattagctggatttccttttggtgattgcattaggtttaaagtacacaggtctcaactctccccaggaaagtttcccctgtttgactccacctttaaaatcctaagcctgactaggacagccacaaaccacacaaggtgtaaaaccatcatcagctaagtgcccgttttgttcttgtttaccagaatctcctttaacttctcaaagggaagccgggctttctaatccacgtcaactttattttagttgtcaaattgggcattatattttatgtaaattggtcttttaacatcattttcctgatgaatgttggtgaccaccacattgtgaaatttaagaatccgtgttgcatgtttggtagctctctgagtttcaggccataaactcagctccagaggttaccttttaagtgccaagaactcaagtgcaaggtggcctactcaaaaatcatttggtagcattcagttattcatgaattcctctctcgcatgcattataaaaagtgatctgctttaaaacaccgtaatctgatcataggcttaaaattaaatatgagtattactttcatgtacaaaatatttcctttatagtcttcatatgccctttaaaatgccaacaagatttcaagtctgtaggcctctagtgaggtggggtggcaaaccacagctaagtctcgctcaccactgcaagctaagaatggtttttacattttgggttggaaaaattttttttgaatatttcatgacacatgaaaattattcaaatgttagtgccgataaataaagtggtactgaaacacagccacacaaacttgtttttgtactgtctacagctactttcacactacagccgcagagctgagcagttcagcagaccgtatgtcccacaatgcctaaaacattgactatgtttacagaaaaagtttgctgacccctgctctagcaaacgcatcctttcctactccaccccaatttgtatttagatagtttctctaacagaacggacaaatgaggctgcaaactaatttatttttgtcaaaaatcaatgttttgacatccacagacagtgaaataaaagaaatggcttgctgaaaaacatgaggagtcctagccacaaaatcactgcttaggttgcaattgccaaaatgaagccttcttagaagcacttctttagtatatacaggtgttggctgaagtccgtgcctcactctgggaaccattcttagtctccagtgtctcctattacaaagaagctggcagaaataaaaatgaaggggtgagagcggttccaccctagtctcatggtggaaaattcattggggagagctgtccaggatatttggagtcctgggtagaaggagcttgtaactactttaaagtcgacatctttgcacaggtgattgagtttctctgacctcattgcttcacctctgtctcctcccgtccttccgcacgtgcccacacacacgcagttcagccctctttcctccataagcctccatcgttttctcttttctcctcttgatcctttcaagcgagtatcttgttgaattgtatgttctgttggatctcctccttcataacatctggcttgttggacagaaaaaccctacagcccaccccctcccacagcccacctccacttttgaaagcccaaattacacctctcccagaacacagtgttgacgtaaatacagttacccaatattcctgtttgttcacctatttgctactttcactcagtagcatcccattttgtaaaatgaattccatggtcaccctgtcacaggaagtaatgaaaaatccagtgttcagtgtagtggtgcaaacctgagggcatagagctgttcatagagggctcttgttatagccaaacagacacagcaacaatctcaccatttatatatatatttttaacttgtccagctcatctatggaaaactactcaggtggtatgctgtttgaagcctcatcttcctacatgaaaattatgggcatttgtcccaatgattttgtttcagctgttctgtaggctgcataaccactctgatatttaggtatctgctattttattatcttaaaagacaaattaatttaattgcatgtgctagggaaaagctaccatgtacattcaccccaagtaaatagaatcctagatgaatcctagaaaaataatccctaagcagataggtagacagaggtaaacattcacatgatttagctctctagctcttgcactctgaacattcttgctttggttctgacttctgggaactgctttgcatttctcctatagatctgtagttaagggaaccaaggggtcattggggcaaaagcattgtttctcaaagctccttgattaagagaaagaacagaaatttgcacagaagatagtgtcaaggagtgagaaagtttgtttgagggcagtagctcagtgtggaagaaaatcctgaagtttctgttgaagccatacaatgttctatggggttactctctaagacattctctgaggtgtgtgaggaagtcactactcctagcctttgttaagatgtaattttaaatattcagttatggtactatgtttgcaactctcgtcttatcacaatgcctcagtagtttgttcccttagaaacatttagatgtgcacaaattaatcttttatatatctaaaggtttttctatcatgcattggattgctcagaataaagtgtctgttagacttcgttttggtaaataaattctccataatgtagattaataatataaaagtctttaatgacacaatatatctatatagcctcactgtataattcagaaataaaaattgattctgc

SEQ ID NO: 248 - DNA, 566 bp, human
gattaagaaaagctaaatttatattaaattatcataaagtcctaaaatactgaacatagtggttaaataactccagaaagtccaatctctccagtgagtaacgttaaaaccattacaaatgagcatgggagaatcgcttccattagtttaggacagagagattttgctttttacagagtaaatcagtgctcaaatagatacttcctcaaatatgtcctttctacattctgaacagcccaagtgcaataagatccttccccctttccaatcaagaaaatgccacttttctacttgctcttcctccccagacatgagtctaaggacccaaagtgctcactcctttactgcttgttaagtgtaatgtggggaggctcagaactggggctgacgctactgagagcaaggctaagggcctggtatctctctctagcagtcttagaactgactagaaaagaattgatcttgtcctttttcactttggtagctgatttctcaataccagtaaccacaggagaagtttcaactcaggaaacttcccctagaaattctcccctccattcccagcc

SEQ ID NO: 249 - DNA, 552 bp, human
gttttaaagttttatttgcttacaaaagaaaatggaaataggtttgcgaaaacttatctgcatgtacaaagtaatccccgtagataaggagaggcaacccctggaacaaactgctggataaatcgttcattaaaattatatctctttgcatcagagctggtggaaaatcattatttcacatgagttaaaaccactgaaaaactaaatctgtttcttaaactaccaaatttcagaaaagcttaaatccaaatgctgatttttggatacacatgaaaccagttaccaagtgatctcagagttggacagatcaattaaacaagaggtagtttctccaatattgtccctttttttcttatcagcaaggttattcctatagcaagtaggagtaagtgacatattctttgaacctctttgaattcttttcctgctagggacatatttccctcaaacacaatcatatctgtttgttcattttaggacttgagagagaagattccagagttcaatttatttttcccaattcctctttgagctctcttctctggaaaaaca

SEQ ID NO: 250 - DNA, 576 bp, human
ttttttttttttttttttacacttcataaaaccatgtttattcaaaaaaatctattcagaaagtctggaaagcgtaataaatatctgtacagtggccacccatctcaaacatgaattacaaagcaggaacataaaaatgatgtgtaaacataactgctgagccagtgaacaaagtgctgagtcaggagcgaggcagagaagcgtgctcagtagaacgacacagatgctgcagcctccgtcctcagcccctcaagctgcgctggagtccaccttccgccctctccacaccgctcagggaccggcagcgtccttctccattctcgaatttgcatgacgcttagaaaggtaggaggcagcaaaacgtgtcagaaatgaacggagtgcaaatcaaactttgccatgtgcttgagagaatcagtaaagcgttaggtaaaaatcccaagtgcagctttaggataacaccatttaatgaacaatactggataacattaagtactattatcactttaaaattcaaacaatcttccaaacatcaatacatacacagttagtttaaaatcacagacaaatcggact

SEQ ID NO: 251 - DNA, 566 bp, human
ttttgggatgcttcactttctttattgcccatccaggggacagccaagccagctccatctgcattctggctgcagcgtgtacattaggggactcaggggccacagtgtgggaccgtgcacactggcaaggcactggcggatgctggcaggccagtggacatggatagatgagaatgacaactcacagatgtcctagcttccgctggcccagctgccagccactggccatcacccttttgcccagcatgtgtgcattgtcacccaaaacatcttgaaacttgccattagtgaggcattcaacaaagaagtaagctaagtgagtaggaaacagtgtttcctggaatataccgcactctgcctgaaataggaaaactatgtttgccgggaagcagcagcagcaggaaagaagttataccaaaaacgacttgtacaccacagacattataaccctttcctcaaagaaacagtcatgttctgttgggtattatggacaggtctctggaaatttatctaataaagaccaacaaacttccccagcagtgcctctgagtaccgtgtgaattctg

SEQ ID NO: 252 - DNA, 1465 bp, human
tgggccctttgaccctgcacaatgacctttgcatcagccaaactcattgccatgacaactctttgtactgtgtccgtgccacagatctgttggtcacattgttaatagtaaaggggacaagttggagacggtcaatttttacattttttgttgcaattttttcttcaatggttgtaagtagttttttttttttttaataataaaggggttcactagttaatactctagaaatatctgtgtgttgcaattcaaatgtatgttgagattgtgaaaagcgcttcagtgccactagcttaccggtacactagactaagcccttgatgacttattgcatgatacagtaccaggaacaacaggtggcctaaatacatgaaaagcagtgtaagctagtgacactaaagccagtcttgtattactgtatttttgacagaatggttttgaaaactgtgctacagggactgatgtggcaaatatatctctttatgcagaaggaagtctttttttttctttttttttttttttaagaagtatggctttttatgcatccttcatcgagggcattggagttgcatggactgataaaagttgatgcaaaacaagaaagaaacaaacaaaaaaaaaaaaaccagcaaaatgtttaccaaaaaactcaaacaaatgagcagtgcctgttcaatttcacagtctctgttgagttcagttgtaaatatgtttcaaatgacattttcttgggaaaaaaaatctctacaacattgtagaatgtgaggggtaactacatcccaggcataggtttctcaaagctgcagtagattatgtcttcatcaagctgttaatttgtgcttatatcatatagaacttttagcatcctgggaagagctgcccccacctcaatgatatttctctgagaacaacttttgtaggactgtgtgtttctttagatacatttagtacaactgtaggtgacgagtagtcagttattgcttgctagctacacaccagggttgatccattttaaaacttttggcattttgtcctcatgggccataaatacagaaccttgtattttaattaaatttttttacaaaaggaggcacatgcacaatctccatgtaacaaacctttagcagtaggatgtattatacgacagttacttaatttctagagttcaggcctctgggatcaaccccagactgggccagaatgttagtgaaggttttattgtgcccggttggaggataacgttctttgggtactttttgtgggttgcaaatgaactcaattgccacaagttttaaactggtgtaaatcaagcttgacttaatgtgattgttactgttatatccagcctatactgctagcagctgctcatactgcagtcaattactggaagcggatatatttcctatgcaaaaactgtttaaacaataaaatgagctatgctacagaaaaaaaaaaaaaaaaaaaa

SEQ ID NO: 253 - DNA, 477 bp, human
atttgtgcaccactgaaaattcttatttattcactttaattctgcatttacacaaaaatgctgtaataaaatatctgtacactacttctgttacaaatatagatatttaaagtgactttatatattctaatgtaggagtttcacgctctaaaatgggaatgaacacatgataattcctcaccagttgtctcaataaacagctccatctgtttcccttagtcttaaactattgtattataagatgttaatataaggcaatgaaatgaagttatgttaatccccttaatttttctatcaatttactaatggcatacaaccaaaataattagtaacacattgttctctgtcattaagattaatatgaattgaaaaccaattgcacagcacactaacacatttttaatgttgcatcggttgttaaaaccagcactaaagattctggaacccttctatgttcctctatggttagcagcatag

SEQ ID NO: 254 - DNA, 630 bp, human
  misc_feature (468)..(468): n is a, c, g, or t
  misc_feature (506)..(506): n is a, c, g, or t
  misc_feature (530)..(530): n is a, c, g, or t
  misc_feature (555)..(555): n is a, c, g, or t
  misc_feature (564)..(564): n is a, c, g, or t
  misc_feature (573)..(573): n is a, c, g, or t
  misc_feature (583)..(583): n is a, c, g, or t
  misc_feature (598)..(598): n is a, c, g, or t
  misc_feature (605)..(605): n is a, c, g, or t
  misc_feature (618)..(618): n is a, c, g, or t
ggagtgacgctaatagcattgtgtttattagaaattgggcaccaagtcgtctttcaccagtgacaacagaaggaacagaaaacctccatggccacccttccccaccacgctgcgtgttcaggaagagtcttgtccaaatccccaccccctgagaagatgaggattgctctgtggaaaatacactcagcagaccagacacagctcagcgcccacgtctgttagccttaggcactggggaatgttttttttcccagagaaagaaagcacttttaaaaagcagtaatcaattaattcagaatgagcaaaggcttaacctctattctccctgccctctgcagagttcacactgcagagccttcttcctttgagacaccctaggagcagttttcctggctctcccctgctgctgtgatgtcatgtcctctgatctccactggattcttgctgtgatactgccagcatggatgncccactgtcagggcagccttccctcctcaatgtgaagnagctctcctgggatcttgccgtgnaagggttggtgtgctatgcctgagngaccccttncgcaatggnacagatcagntccaagttaacctgnaccaaangtggttagggcanaaaagggaaccc

SEQ ID NO: 255 - DNA, 658 bp, human
ttcataatttcattgtcatttatttcaatcctgtggcacacactgaatataacaggcttgaaaaacactttgatatttcctttgtagattactaaatgctaccattgatttctgtaaattaaatttactaggaaaacccacagtttaaaaaaagtacacaagaataagctagctgatcacaatgaaatgaatgaattcaaaatagtataaagtcaggaacagtttatcttcatggtaaacattcactttatgcaaatcccacttggcttcatttaattaaaaagctataaggatagccgtggtacttggaacgaaatattgaaagtagaaaactgaagaagaagaccaccaggcccaatcccactaggcaaattatccgtctttttccaacatcgcctttcgaagttgctgcttcatttagaagaaccatccccatggtgatagcggcattcagtaccagaataatgtgtgattctgccacaaactgagcctggctgctcccatgaatgtagctcacttgtccattgtgtgggttcttatgagcatatggaggtccacggatatggttccacatctggccagaagtcatagcaaagactatacacagagacaccatggcccaaccaagtctgttatagatgaaactccagtggttctt

SEQ ID NO: 256 - DNA, 459 bp, human
  misc_feature (46)..(46): n is a, c, g, or t
  misc_feature (377)..(377): n is a, c, g, or t
  misc_feature (442)..(442): n is a, c, g, or t
tttttttttttctgtaggatttttattggtggcacctggggcaatnggagggagtcctcagcacaggcgctggggtgtgggaaatttcagaggcccctcctgggatgtcacccttcaggtcctcatgagtcaatcttgagtttctccttcactttctgaaatgtctctgaaaaccactcccgcatcttggcagaaagttcactctgtttgatgcggctgatgagttcccgagccttgtcctccagtgtgtttccaaactccttcagcttatccaaggcactggagacgtctggggtcccctgggctggggctgggcttccaagacgatcgacagaaccaccaccaggaccgggagcgacaggaagagcctcatggcnaggccggaggggcactctctcaatcttcctgactctgtggggtcctcagaccaccttaagtcccnttccccactcagaatgt

SEQ ID NO: 257 - DNA, 542 bp, human
tcgtcccccgccgccggccgctcgcccgccgaccaccgcggctacgccagcctgcgcgccgcctcgcccgccccgtccagcgcgccctcgcacgcgtcctcctcggcctcgtcccactcctcctcttcctcctcctcgggctcctcgtcctccgacgacgagttcgaagacgacctgctcgacctgaaccccagctcaaactttgagagcatgtccctgggcatcttcagttcgtcgtcggcgctcgaccgggacctggattttaacttcgagcccggctccggctcgcacttcgagttcccggactactgcacgcccgaggtgagcgagatgatctcgggagactggctcgagtccagcatctccaacctggttttcacctactgaagggcgcgcaggcagggagaagggccggggggggtaggagaggagaaaaaaaaagtgaaaaaaagaaacgaaaaggacagacgaagagtttaaagagaaaagggaaaaaagaaagaaaaagtaagcatggctggcttcgcccgcgttctcgtcgt

SEQ ID NO: 258 - DNA, 667 bp, human
  misc_feature (395)..(395): n is a, c, g, or t
tggcgcagtgggagaccacgttttattcagtccagttcaggatccccgctatctcagggctctctgggccagtcctcctgggagcccccaccacaacacttcccaggcatgagccctcaggggcccacatgagcttccacacactgagaagtgtccgagaaattggtggggcctctgaaggaggctgtgagcagcccacctgaactcccagctcaccagcccaaacagggtgcaggggctctggccctgaagaacctgagtggagtggaatggcactggctggccactcagctcagcgggcgacgtgcccctacaagttggcagaagtggctgccactgctgggtttgtgtaagagaggctgctgccaccattacctgcagaaaccttctcatangggctacgatcggtactgctagggggcacatagcgcccatgggtgtggtaggtgggtactcgctcataggatggtaggtatccccgggctggaagatgtccagcttgccgtagttctttccgcggcactgacagacagccaaggcaatgagatagacaatggccagcgcaacccagacacagaccagcaccagcagcgcgatgccccagcctggcaccccagccccagaactggcagagaaagaattgcacatcactcacgctgacgtctga

SEQ ID NO: 259 - DNA, 1427 bp, human
atcctgggatatagatctcttggaaatgtaataatggtatgcaggaagggagaatgggttgctcttaatccattaaggaaatgtcagaaaaggccctgtggacatcctggagatactccttttggtacttttacccttacaggaggaaatgtgtttgaatatggtgtaaaagctgtgtatacatgtaatgaggggtatcaattgctaggtgagattaattaccgtgaatgtgacacagatggatggaccaatgatattcctatatgtgaagttgtgaagtgtttaccagtgacagcaccagagaatggaaaaattgtcagtagtgcaatggaaccagatcgggaataccattttggacaagcagtacggtttgtatgtaactcaggctacaagattgaaggagatgaagaaatgcattgttcagacgatggtttttggagtaaagagaaaccaaagtgtgtggaaatttcatgcaaatccccagatgttataaatggatctcctatatctcagaagattatttataaggagaatgaacgatttcaatataaatgtaacatgggttatgaatacagtgaaagaggagatgctgtatgcactgaatctggatggcgtccgttgccttcatgtgaagaaaaatcatgtgataatccttatattccaaatggtgactactcacctttaaggattaaacacagaactggagatgaaatcacgtaccagtgtagaaatggtttttatcctgcaacccggggaaatacagccaaatgcacaagtactggctggatacctgctccgagatgtaccttgaaaccttgtgattatccagacattaaacatggaggtctatatcatgagaatatgcgtagaccatactttccagtagctgtaggaaaatattactcctattactgtgatgaacattttgaagactccgtcaggaagttactgggatcacattcattgcacacaagatggatggtcgccagcagtaccatgcctcagaaaatgttattttccttatttggaaaatggatataatcaaaattatggaagaaagtttgtacagggtaaatctatagacgttgcctgccaccctggctacgctcttccaaaagcgcagaccacagttacatgtatggagaatggctggtctcctactcccagatgcatccgtgtcagctttaccctctgaacttctgatcgaaggtcatccctctccagcttgagtggatcaagatgacaagggccaatggaaaccaagtttgagtcttgccaggtcaatacttgggtcctgagtatggtgactagtatctgttttgttatgtgtgtattattccagccagaatgggaaatgctaattcagctcctccaggcagcccaatggggctggtggctttgagattattaaactctttctctgctgc

SEQ ID NO: 260 - DNA, 2503 bp, human
gtcacaaatgttttccttttgatttttttcagaaagccattaaaaaaatccaaagaccattcttagcttgcaggctgcacaaaaacaggaagcaggcggggtttgcttatggactgtggctttcccacccttgttcttagatagggacacaccaatatatcatgattagttgtaaaggatactgccagtaacatattattactggttagttgtaagaatatcaaagttagtgaataatttgcttttaaaataaattattgttgatttatttttataaataaatggcacagggcatctcatgctcttgcattctaatatattttctggaattgatgcaaaagtggtggcagtaaagtacagagccggctaagcagcagttttgtcttaagtaactgtggtgatcatggacaaccattgcgctgaactgctcttcatggtaaggatttcagtgtttcagagtaattcattaacctagagatgttttaaaaagttgtatcggccgggcgcggtggctcaagcctgtaatcccagcacttcgggaggccgaggtgggcggatcacgagatcaggagatcgagaccatcctggctgacacggtgaaaccccatctctactaaaaatacaaaaaaaattagctgggcgtggtggcgggagcctgtagtcccagctacccaggaggctgaggcaagagaatggcgtgaacccgggaggtggagctttcaatgagccgagattgcccctctgcactccagcctgggtaacagagcaagattccgtctaaaaaataaataaaataaaataaaataaaataaaataaaataaaataaaagttgtatcaaaatctgctgcaccatgggagtgttttacacatgtgatgtggcatctaccttatgtaccataatggaaaaatgtttgagaaccactgcactaggccaaaggctgggatgtgtatactttgctgccgtgtataattgtatgtccttgttctctaaatggaattggttatgtttagtgaacagttaggtggttctccgtgtgtttatatacacagacgatccccgaatttggatggttcaacttaagagttttcaaacttacgatgatatgaaagtgatatacatttgatacattcctacaacttacaatggggttatgtcccataattgttttgacttatgatattttcaacttacaattgatgggtttactgagacataaccctcttgtaacttgaggagcatgtgtatatttgtacatacatgatggtgtgtgtttatacacaaaggcctgaatatacacaccatgagcatttgaaggtctttgtcaaggttgtttctgtttctgatctcttgcctactttaaaacccaagaggtagaacattatgcatattacaggcaaaactatgcttgagtttatagcaatgtagtttgtagaaaggattcctggatgttttactaagcctttcctcctccattcaacattatatgaattgttaagaacatataaagtaccactgttgaatgtgacttttctatactgttagttaagaaaccaagactagtgttagctgagtaactggcatgttgatgcaacctatacaggttttgtatttaattaggttccttattcagttattcaagtatccagttatttagtttcaaggtagatttctttgtttttatatttaataaaagacttgcatataagttcctcttcatgaaaatagtggctaggctagtgtgattttaagtatgtctggcaactcaaaatgtaatggattcatcaagctatttgggatttttaacataaaacacactgctgcttgattaatgtgttcagttttcccctggatatttgctattaggctgatagccatttggttggattcttctggagagtaattgattctctaaggtaatggggtgctgcagtgggtgtagcattcacccaggtcactagaatcctacctgtttcatcacatagaaggccctggccatggggaagagtgaatgcagcttctccggatgccttatttccacagacatgctgatatgctggaacagtctggctccaggagtattaatatacttttttgagactgtctacaaaatcctattttgtaaaaactatgcctttacatagacattgataggttatatttgttttataacaattgtgtacctaatgtttgtgattaattttgagatttatgtatatttataagcctatcttatgtaaatttttactctaagatgtgtggcacattactaataaagatgtggatttctatttatgtaaagtaattgtagcaatattcctagatgctacctaaatgattgttctgtccatttgccatcacaaatacttttatctttggatgattatgttagtcagaatatattaattagatttaaactttaaaataagaattacaacatagtttgaaattcttcctgttgaagtaattaaagttagtttataattcaaaaaaaaaaaaaaaaa

SEQ ID NO: 261 - DNA, 462 bp, human
tttttttcatggtaacgtgaaagtttatttttgtctgaaagctttcataagtatttaaatcaacacagtaatcaactatttaattgctgcaatcggtcaaaatttacaaaagccacacacaaatttctctccttctacacgtagctccatacactgccccttgccaaacacccttccgggaaccaatcagcatgacattcctgggcagttaatgtgaaaagcgagggcagggcaccgtccaggtggactttatccttcagggagggccgtatcctctcctcttacactctgtgtgtgtttaattttctaaagaaacaaccatttattcattagctatactcagccatcttctcttattttctaaacatgcccatttgacctggcagagaacgctgcagcttttgcaggttgataaaagatgtttcacttaatgaccactgggcgttttaactcctttcagcc

SEQ ID NO: 262 - DNA, 1134 bp, human
taatatttattawaggtattttaaaactcaggttgatctctcatcttaactgtgattggttcaattttrccataccgaaagaataaattcatttgagcttttacctacgcctttgctttttgttaaaggaagaattcaatgcaatgtgttcagaaagttacatttaaatcgttaataaagagaaaaaggaagagaaagagaggacaccattccgacacaaacgtttatgtgattttagccattacaacagtaattcagaaatatctcaaatgttacattgatgtcatcaatattacaaaaaaggaaaaaaaagtgrsgggcaacagtgaagagcaccagagacccagcgcacacctaaagtagaccatgcttctttccttccactgccaggttatcgtcccgggaagccccccaccccctcgctttcctcctccgctttccctaacccgtctcgcgggggcatctacgcctcgtcctcgccctcctcctcctcgaactccccttgttcgtcggccgtggcgtcctggtactgctggtactcggacaccaggtcgttcatgttgctctcggcctcggtgaactccatctcgtccatgccctcgcccgtgtaccagtgcaggaaggccttgcgccggaacatggccgtgaactgctcggagatgcgcttgaacagctcctggatggccgtgctgttgccgatgaaggtggcgcgacatcttcaggccgcggggcgggatgtcgcacacggccgtcttcacgttgttggggatccactccacgartagctgctgttcttgttctgcacgttgagcatctgctcgtccacctccttcatggacatgcggccccggaagatggcagccaccgtcagtaggcggccgtggcgcgggtcgcaggcggccatcatgttcttggagtcgaacatctgctgggtgagctcgggcacgtgagcgcccggtactgctggctgccccggyggtcaggggcgcgamcggggcatgaagaaktkcaggcgaggggagggcacatgttcacgscarcttkcgcagktytsgttcagttggccggggarcgcgggmagkggkgacccgctcatggkggssgmacmaggggttgwggcccskrggggggggg

SEQ ID NO: 263 - DNA, 235 bp, human
  misc_feature (210)..(210): n is a, c, g, or t
gcggccgcctactactactatacggctgcgagaagacgacagaagggctacgacgtggtggcggtgtaccccaatgccaccgcggaactcgtctgagctgggaccctgctcccacgcctgcttcttaaggtccctgctcggccggtgtaaatatgtttcaccctgtccctctaataaagctcctctgctccacctcgaaaaaaaaaaaangaaggagaaaaaaaagtcgtatcga

SEQ ID NO: 264 - DNA, 384 bp, human
  misc_feature (275)..(275): n is a, c, g, or t
  misc_feature (278)..(278): n is a, c, g, or t
  misc_feature (303)..(303): n is a, c, g, or t
  misc_feature (313)..(313): n is a, c, g, or t
gaaagtatgcagcatttattacaaagccaagagatacagatgtcccagggcaaaggagggtacagtcacaggacctcagacacaggacaaggtgcaaacacagacaagcccatcagggggctcccaaccccacacacctacgctatgatggaatctcgagtctcgactcccgactcctctcagatctatgcacacttgaggaaatcttcggtgggcagcgacctgccaggggtctgtcctagggaggggtggtccgctgaccttaagggtggggngtntgggggggtcagagcttaccaggtnttctgtcttncttgtgcttttaatgggcagttgctcttgcctgacccaaggtgaccggggctcactggggccctcgtgccc

SEQ ID NO: 265 - DNA, 711 bp, human
  misc_feature (486)..(486): n is a, c, g, or t
  misc_feature (636)..(637): n is a, c, g, or t
  misc_feature (663)..(664): n is a, c, g, or t
  misc_feature (675)..(675): n is a, c, g, or t
  misc_feature (684)..(684): n is a, c, g, or t
ttttgaaggttgaagcagtattatttttattatccaaggcaagaccagtgaaacacaaagccccttaaacattatttctgcagaattccaagaacacaggagaaactagtaaattgtataggattaataaagaatatggattgacagaagaacaatcataaaacattcatattggcattcttggcaggcacagctctactccatggccatgtggattatcagaggtctcgagttccactctctgacaggaatcaggctagattatggtaataaggaggcctgaaggtcttatcagcaaccccccatcgaggtgggaagatgacaaaatcagcaatggccactccagggcggacagacttagcagtcaatactgtgaaaatggatgggtctgcatggtcaaaggccactgagttgataaccatgaaattcttcaggttgtacttgtagggtgtataattcccgtgccaggccacaacattgaacggngagacatcctgtttggcagcaaacagcttgccctggtatttattaatgaccgtgtaaccacctggtacttggcgatcctcataccaggcaatgggtatcaagaaatcacgaggattggccaagccattggccccattggtccaaggtcanngtactcaagttgacaccatagacctnncagatgtagcnccctgtctnctcaaagacatctatgctgaaccgcat

SEQ ID NO: 266 - DNA, 5721 bp, human
ggcggctcagacacggcccgagcgccgccgcggacgcggacagagacccgcacgggcacgggcgctgcgctggaggctcccctcgcggtccggggctgcgcgaccatggcggacaaggaggccggcggcagcgacgggccccgagaaacggctcccacatctgcatattcatctccagcccggagtcttggggacacaggaataacgcctctgtccccctcccatattgtgaacgacactgactccaacgtctcagaacagcagtcatttctcgtggtggtggccgtcgactttgggaccacatccagtggctatgcctacagcttcaccaaggagccggaatgcatccatgtgatgaggcgatgggagggaggtgaccctggtgtgtccaatcagaagactccaaccaccatcttgctgactcccgagaggaagttccacagcttcgggtatgccgccagggacttttaccatgacctggatcccaatgaggccaagcagtggctgtacctggagaagttcaagatgaagctgcacaccactggggacctcaccatggatacagacctgacggcagcaaatggcaagaaagtcaaagcccttgaaatctttgcttatgccctgcagtactttaaggagcaggcgctgaaggagctgagtgaccaggcgggttcggagttcgagaactctgatgtcagatgggtcatcacggtgcctgccatctggaagcagccggccaagcagttcatgagacaagctgcctaccaggcaggcctggcctcccccgagaactcggagcagctcatcattgccttggagcctgaggcagcctctatctactgccgaaagctgcggctacaccagatgattgagctgagcagcaaggcagccgtcaatgggtacagcggcagtgacacagtaggagctgggtttacacaggctaaggaacacatacggcgtaatcggcagagtcggacctttttggtggagaatgtcataggagaaatctggtccgagctggaggaaggtgataagtatgtggttgtggacagtggcggtggcaccgtagacctgacagtccatcagatccggttaccggagggacaccttaaggaactgtataaagcaacaggcggaccctatggatctttaggagtagattatgagttcgaaaaacttctgtataaaatatttggagaggattttattgaacaattcaaaatcaaacgccctgcagcctgggttgacttaatgattgcgtttgagtctcgcaaaagggcggctgccccagacagaactaacccgctgaacatcaccctgcccttctccttcattgactactacaagaagttccgcgggcacagtgtggagcacgccttgcggaaaagcaatgtggattttgtgaagtggtcctcgcaggggatgctgcggatgagtccagatgccatgaacgccctttttaagccgaccatcgatagcatcattgagcatctccgggacctgtttcagaagcccgaggtgtccaccgtcaagttcctctttctggtgggcggctttgccgaggcgcccctgctgcagcaggcggtgcaggctgcttttggggaccagtgccggatcatcatcccccaggacgtgggcctcaccatcctcaagggtgccgtcctctttggcctggaccccgcggtcatcaaggtgcgccggtcgccgctcacctacggggtaggcgtgctgaaccgctacgtggagggcaagcacccgcctgagaagctgctggtgaaggatggcactcggtggtgcaccgacgtctttgacaagttcatctctgccgaccagtctgtggctctgggtgagctggtcaagcgtagctacaccccggccaagccctcccagctggtcattgtcatcaacatctacagctctgagcacgacaacgtcagcttcatcactgatcccggggtgaagaagtgtggcacgctccgcctggatctcacagggaccagtggcactgcggtgcccgcccggagggagatccagacccttatgcagttcggggacaccgagatcaaagccacagccattgatatagccacttcgaagagtgtcaaagttgggatcgacttcttaaattactaaccctcccgccccgctgcctgtccccttggactcaacttatctgcatctgctgacctcaaccttgactgttctttccctaaccttgaccctcaccattgcccatgtgaatttcagcagggaagatgagaacaatcagggctagaaataattagtgacttttgagggcacactggagtcagaaaaacagaaattaagattaaggtttaggcatagaaaattaaaggatcctggaggagcagctagttttcataggtacaaaagtggtgaaatggccacggagaagggaatcagtacatttctgcagcagtggttgcgctgctttgaacagatctccgttatgtagaatttaggatgccctattgctgtctttctagatttaaaatgagatctttgaaccaggaggagatcttcatctgagacttgtctttctaaattttttggatggccatcaatataaaatgccacccatctgcagttaatttcttttcctcatcatgtgattaaaagtggtgattcagtgggaactgggaatgtttttagctggtggtagaaggctgcctacactgggcactgttttagattctcatatcatttaaacagcaaggaggttcagggaagaataaccgtagccttgggtaatccactagggcttttgtgagtaggagagctgatacctcacattcttagcaggtgaaaacttgccatgatggaaacagatagtgaagagttactgacgtatcccaaattatatgctgtgacataaattcccagcatgcccagccctgatttctgagttcataagtaattctagtgaaccttagtaggaattctgggtaagaaaatgaggttgccattggtcttgtttgcatcaccaagaccagacatccagaagagcccctcaccttgaaaagcagacagattttaaattaaccccctccttcccactcaccttcatctccctaagagttttggccatttaattccacattttgaaaggaatacattggtgaaatttgggaagagaatctgtgctatgcaatgtttcattaaaatcttcagtttttcaagtctctctaaaaataatttgtagatctatacttgatgtattaagtcagttttttttcacagcgggcctgtggctcgcctgcatcagaattgcctgggtgcgtgttcagaacaggttcctggatctgagccctttttaactgaggccgactcttggagaggggcaccagaatctgcatttgtagtgtataccacatcgtggttcaactgaaattggagaaatactaacctgagattttgttgaagttcacacacagatcacagcccgccctctgcaggtgtcccctttgggctcctttaggaagagggcttccatgagaaggtgaccccataccttgccctcttggtcaatgggattggggctccacctggcttggagatggcccttttaaccctcacaggaagggccaggggaggaaaaaaattgcaagaaagcgacaccaagaacggagctgactgaggaaccaactggagggtcttcactctctccttccccagtgtacaaaaccagttttctgcaacattcaggagccaaatgaggaaaaagaatcaagaatctgactcacagcccatctgatctgttcaaagctgtcttttccacctgctgaaattcattaaatcactggaggcatgcataatgaatggagaatgagtgaacttccaatgcaacttggattcacaaacccattatcatagccaatatgcagattttaaacagcatttcacatttcatttgaccatgtcttctttttcgcatcgcctgctgcagaattccctactagaatgtgaaacaacgaacaaaccacagaacttagagtgtgctggttagtcacataacttagtagcaggattgtgtatccaggcacaaaggtgtctttgctaatgttctcttgctacctgccctgcttcaaacgctaaatggtatgggtctttctttgttgccagccatattctacaaataagacttttcaatatagttatgagtaatataattttatgtacatataatgttagaatattgtacagaatcttggtttctacgatgcgcttttcttgtttcaaaaagaggaaaatgcttgatttttgttgatgatacttttgttactgtccttaattttccatagtttggtttcttaattgtgctcactaagcatcgatctgtgctgatgccaagctatggactatgtacgcaagaccgagcaatagacagaggtgcctagggtccaaacacactgaacgcacgtggaccgcctggatcaggagcctcatcagacccttctccatgcacatccttcccaaacagtcacagattccattgaaaggagcagattctatcagttcttctgtgcagactttaagagctgaacgttctggttctggaagccatgtgactgcgcagaacaacctaagaaaccctttgtgtcctgaggggtcgttgacctctccttccgggtcggagcagtcactctgagggcaaagcgtggtccactgtgtgtgatgttttcaggatgctagggtcaaagaaagaaaccaagtggtacataagcccagcttttctgctgggctaagtgtaagtgtgagtaacatggtcaagcccctcttttttgggctaatgtaaagcctttcctgccttgcattaatgctatctccctgtgtactgtttctcttaaatgagcagatagaaatctgcagtgttggcagataggtgatggagaggatgataattttatcttctggccacagagctgcagccccagttgtcagagtccttaaatgaaacccccaaatccatccctccttccctacccccactggaatattctagaataagagcactggataagtacacttgaacacatttttctaaccttagaaaatacctacaaggcctgttgtcttgacccattactcaattgtccctggcatattatctgatcttcacgtttcttggaagcagaatcatcaaggctttcctttgtaactgccctttccgtacacagcaggcatgaataaatgctgagtaacagacaagttacagacaggaggggaaagaggaggaaccatacaactgtttttgcaaaatgatggctgagtccagattatagaggttgccttacccttagaatgttatttagaccaagtttagcttttagagtccaggtctggttaattgccagggtagcaaagaatcgcatgcaccaatgtaaacaggagtcagaatgcattattagtcaaagatcgaatttcacattgtagagatgtatagctgtgattaagctgcatatgtatgctgggaaacggcttgagtggatggctaatataaaagttgttggccataatgccacacctctcatctgcttgaaatatggaccagtattctaaaatatcagctactggggtctcattcactacaagataaattcaaacttcacagaactttgcagcagttcaccaccagacgggactgtgtctgcaaactctcttgtcttcacagacgcctaataaagcaaaactctgaatctc

SEQ ID NO: 267 - DNA, 353 bp, human
  misc_feature (6)..(6): n is a, c, g, or t
  misc_feature (8)..(9): n is a, c, g, or t
  misc_feature (14)..(14): n is a, c, g, or t
  misc_feature (18)..(18): n is a, c, g, or t
  misc_feature (26)..(26): n is a, c, g, or t
  misc_feature (81)..(81): n is a, c, g, or t
  misc_feature (112)..(112): n is a, c, g, or t
  misc_feature (164)..(164): n is a, c, g, or t
  misc_feature (297)..(297): n is a, c, g, or t
ctcgtnannttggngcangacgtcgnagctcatctctttggggtcacagttctattttgtttgtgagtttgtattattatnattattattattattattattattatatttnatttctttggtctgtgagcaactcaaagaggcagaagaggagaatgactttnccagaatagaagtggagcagtgatcattattctccgctttctctttctaatcaacacttgaaaagcaaagtgtcttttcagcctttccatctttacaaataaaactcaaaaaagccgtccagcttatcccatnctctgattgtcttctgacttaagggatttactgtggtgtaggttcttgccagccaa

SEQ ID NO: 268 - DNA, 820 bp, human
ggctgggagcagaatggctggcctgctgtgagcaggagaggagattctaagaaggatagtcccccctacaacatactgtcatactgctgggttttcatgggtaggaaagcttgtccctgaccccagcagcaaagaggtggcaggtcgctaatgaatatatgctttataatgtccttcttcattgctgagagggcagccttagagctgtggatttctgcatcccccctgagtctgacccatggacacctgtttcattcactttagcatcacagtgaccttgtatgctctgttcagtctgtgtcaggcagtatgcttgtcctgaagagaggttgctatcccccaccccaccacccaccctgttccttttttatcaggaggacttcagagccaggcctgcagcattttgtttgaaaacacaatcagctctgacagttagacatgcacacagacgccatagctggattggaaacattgatgtttaaaaatttattttttgggaaatagttgccaaatgctgcaatttagcttaaggttctatagatttttaactagtccaacacagtcagaaacatgtttgaatcctctgtaacaaggcattaatctaataaaccaggatccttaggtgcacttgttataaaacggtttcctcatgatttttaacgcatcttactaagcctaatactttttgtgtgagacctcacggatcttggtgagattcctgtctacaccagctaaaggggtcagagaaacgcggctcatcccaactgagagggcgccgggcgctcttctctcgaacggaaaccatgagagaccaaaagcc

SEQ ID NO: 269 - DNA, 2147 bp, human
caaacttggtggcaacttgcctcccggtgcgggcgtctctcccccaccgtctcaacatgcttaggggtccggggcccgggctgctgctgctggccgtccagtgcctggggacagcggtgccctccacgggagcctcgaagagcaagaggcaggctcagcaaatggttcagccccagtccccggtggctgtcagtcaaagcaagcccggttgttatgacaatggaaaacactatcagataaatcaacagtgggagcggacctacctaggcaatgcgttggtttgtacttgttatggaggaagccgaggttttaactgcgagagtaaacctgaagctgaagagacttgctttgacaagtacactgggaacacttaccgagtgggtgacacttatgagcgtcctaaagactccatgatctgggactgtacctgcatcggggctgggcgagggagaataagctgtaccatcgcaaaccgctgccatgaagggggtcagtcctacaagattggtgacacctggaggagaccacatgagactggtggttacatgttagagtgtgtgtgtcttggtaatggaaaaggagaatggacctgcaagcccatagctgagaagtgttttgatcatgctgctgggacttcctatgtggtcggagaaacgtgggagaagccctaccaaggctggatgatggtagattgtacttgcctgggagaaggcagcggacgcatcacttgcacttctagaaatagatgcaacgatcaggacacaaggacatcctatagaattggagacacctggagcaagaaggataatcgaggaaacctgctccagtgcatctgcacaggcaacggccgaggagagtggaagtgtgagaggcacacctctgtgcagaccacatcgagcggatctggccccttcaccgatgttcgtgcagctgtttaccaaccgcagcctcacccccagcctcctccctatggccactgtgtcacagacagtggtgtggtctactctgtggggatgcagtggctgaagacacaaggaaataagcaaatgctttgcacgtgcctgggcaacggagtcagctgccaagagacagctgtaacccagacttacggtggcaactcaaatggagagccatgtgtcttaccattcacctacaacgacaggacggacagcacaacttcgaattatgagcaggaccagaaatactctttctgcacagaccacactgttttggttcagactcgaggaggaaattccaatggtgccttgtgccacttccccttcctatacaacaaccacaattacactgattgcacttctgagggcagaagagacaacatgaagtggtgtgggaccacacagaactatgatgccgaccagaagtttgggttctgccccatggctgcccacgaggaaatctgcacaaccaatgaaggggtcatgtaccgcattggagatcagtgggataagcagcatgacatgggtcacatgatgaggtgcacgtgtgttgggaatggtcgtggggaatggacatgcattgcctactcgcagcttcgagatcagtgcattgttgatgacatcacttacaatgtgaacgacacattccacaagcgtcatgaagaggggcacatgctgaactgtacatgcttcggtcagggtcggggcaggtggaagtgtgatcccgtcgaccaatgccaggattcagagactgggacgttttatcaaattggagattcatgggagaagtatgtgcatggtgtcagataccagtgctactgctatggccgtggcattggggagtggcattgccaacctttacagacctatccaagctcaagtggtcctgtcgaagtatttatcactgagactccgagtcagcccaactcccaccccatccagtggaatgcaccacagccatctcacatttccaagtacattctcaggtggagacctgtgagtatcccacccagaaaccttggatactgagtctcctaatcttatcaattctgatggtttctttttttcccagcttttgagccaacaactctgattaactattcctatagcatttactatatttgtttagtgaacaaacaatatgtggtcaattaaattgacttgtagactgaaaaaaaaaaaaaaaaaaaa

SEQ ID NO: 270 - DNA, 3082 bp, human
atttggagtcaggcctggctgttgctcaggtgaccagcttgtgtctctgggagggcgctgctttccccggccacccggcgcgatgatccagaatgtcggaaatcacctgcgacggggcttggcctctgtgttctccaaccgcacatcccggaagtcagccttacgtgcggggaacgacagtgccatggcagacggcgagggataccggaaccccacggaggtgcagatgagccagctggtgctgccctgccacaccaaccaacgtggtgagctgagcgtcgggcagctgctcaagtggattgacaccacggcttgcctgtccgcggagaggcacgctggctgcccctgtgtcacagcttccatggatgacatctattttgagcacaccattagtgttggacaagtggtgaatatcaaggccaaggtgaaccgggccttcaactccagcatggaggtgggcatccaggtggcctcggaggacctgtgctctgagaagcagtggaatgtgtgcaaggccttggccaccttcgtggcccgccgagagatcaccaaggtgaagctgaagcagatcacgccgcggacagaagaggagaagatggagcacagtgtggcggctgagcgccggcgcatgcgccttgtctatgcagacaccatcaaggacctcctggccaactgcgccattcagggcgatctggagagcagagactgtagccgcatggtgccggctgagaagacccgtgtggagagtgtggagctggtcctgcctccccacgccaatcaccagggcaacacctttgggggccagatcatggcctggatggagaatgtggccaccattgcagccagccggctctgccgtgcccaccctacgctgaaggccattgaaatgttccacttccgaggcccgtcccaggtcggcgaccgtctggtgctcaaagccatcgtgaacaatgccttcaaacatagcatggaggtgggcgtgtgcgtggaggcctatcgccaggaggctgagacccaccggcgccacatcaacagtgcctttatgacctttgtggtcctggacgcagatgaccagccccagttgctgccctggattcggccccagcccggcgatggtgagcggcggtaccgagaggccagtgccagaaagaagatccgcctggacaggaagtacatcgtgtcctgtaagcagacagaggtgcccctctccgtcccctgggaccctagcaaccaggtgtacctgagctacaataacgtctcctccttgaagatgcttgtggccaaggacaactgggtgctgtcctcggagatcagtcaggtccgcctgtacactctggaggatgacaagttcctctccttccacatggagatggtggtgcatgtggatgcagcccaggccttcctgctgctctcggacctgcgtcagaggccagagtgggacaagcactaccggagcgtggagctagtgcagcaggtagacgaggacgacgccatctaccacgtcaccagccctgccctcggaggtcacacaaagccccaggacttcgtgatcctggcctcaaggcggaagccttgtgacaatggggacccctatgtcatcgcgctgaggtcggtcacgctgcccacacaccgagagacgccagagtacagacgcggagagaccctctgctcaggcttctgcctctggcgcgagggggaccagctgaccaaggtatcctactacaaccaggccaccccaggtgttctcaactatgtgaccaccaacgtggccggcctctcctctgagttctacaccaccttcaaggcttgtgagcagtttctcttggacaaccggaatgatctggcccccagcctccagaccctctagatgccctcagtggccacatcatgcccactcccactccatcctgtccccaaggactcacatacagtgcctggagaaagccaaagacctttatttcttcctgcctccccgtgggaagcctccgccctgaggtccgctggcccaccacccctgggtgctcagtttctaccaacatgagccagcaagtccttgtggtagccctggggtagcctgtagtagactcgggtcctgtccacagccctagctgccagcaatgctgtcctcacagaggcatagtcgcccccagctgggttgtgctccactgtgacggtggcccggggggaggatgccagcagcctggctatggctccagctgtgctgtggcccagcagcatggcctgcatctggaaggacacaggttgccagagcccctggcacaactctagcatatctgtgagcagctgttccctgtagccactgcccagcacctcctcaggccagcctggtgccacagtcacgtgggggaagacctcagccacagctgtaagcagctctctgccagccacatggccggggaccaaaaaactcccgtgggagattttggccccaacccacacaggccaatgcaagaggccaaggctggagaggcgtgccagcaaggccagggatggccggagggctgcgggctccgctatttgcaaatggatgccccagtgtccgggatgtgtggccagctgctgcaggcaggactccagcgtcaggatgttgccacttggagtatgaacaatgggcacggggttttcagccacagttccctcgaggccagtgttcagcaggatcatgccttctgtgtctggaagaggcggcagaggcaacagtgtttaggatttgggttatcataaggtgttaagagtcccttgttaaaggggcagtgggagttatggggtcatcaaggaccttgcctctctggaatctgtcaacccagttttgggctccaggtggatgggttgctttataaatgtgcctggtgcatgagaaactcttgtttcagctcttggcctttacccatgactcagcctgggggctggtgccggccttgcctgcagcaatgtagctgaggactggtctgaaggccaggagccctgtgctcttgacatcactgtactccctctccctccccgcaaccctgccccaccttgcatccagggtatggtgtaaataaacctgtgttgccatggc

SEQ ID NO: 271 - DNA, 1170 bp, human
tttttttttttttttagaaaaaaaccagtttattaagtaatatcatataaataactggttacaaaaattggatttggcaaaaggcatatttactcttggtgagaaatcactttttaaattggcattcttttcaaatttataagtctaagaaaacaaaaccaaataaaagaagccatttcaaggagtgcgtatttggccattggactggcaacaaaaggcccggccacactgagctaaaaggtaatactctcgaccccattcttctaacacagaaaactttctcaggtaaacgggggggttatgagaatccccctaactagaaatggtggatggggaactggagcattggcgtggctttcatcaggtgtccttggtggccaaagacttggaacggatactggaggaaaacggacaagatgtggaggcattcccgccagtaaatcttcaaggggtgggcatccggtgttcaatttatacttgggaagtattttaaattaaaaacaatcaataccaaaaagctttaatttggggggtttaaaagtcacaaatcacagggggagaatgccaaatggcgtttagctgggaactactgaagacgcacatagcatttattataagggcctactcttaggcagttcactctcaaagcaatgaaaataatctcaaaccaaacattacaggtgggttgtgaagcgttcctacgtatcttccgagcagggtcagttttacattgtgctaccacagaattcccaagaatgcctggtaattcttatacattggatctttaataaccctaaactattagatcctagaaaacataaaggattagaagaggcggctcccgaacattttccgtaaataaggtagactcaagaaagaccagatctcttagggggaggggctcttccccagggggggtgcagtgcccccattggtgggattacccccctgggagggaaataggtgtggtggtgacgtggggttttgagacaacacaacacaacaggggggcgaaaaaacttagaggacgagacagacacacttataagagcacaatagtaaaataaaagcggcacagatgtgagaacaatatgaaacatgatagagaaacaaaatagttagtgttcacttctgtacgtcctggctattgaagtagtggcagcgaaatga

SEQ ID NO: 272 - DNA, 390 bp, human
tttttttttttttttttttttttttttttggatcaggcagctttattccaaagggcagctgagctcacctcccagtgagggtctgggctgtgagggcccaggtggcaggcaggggtggggcaaggaccctggagtcaggacttccccaccttttggcttacaggggcagcaggcccacctggcagtctccagggctttgagggtcccctccgatgggagcaccttccattcccaaatcccaagttagaccaggggcttccgaagctggaatctgctctttggaggcaaggctgcccaaacagcctttgtacagaggggggcgcacctcaaacactcctcgggatgtaaaaccagcattcttgctgctgagccactgccttgcattaggca

SEQ ID NO: 273 - DNA, 2380 bp, human
atgcaaaaattagctgggtgtggtggcagcttcctgtaatcccagttactcaggaggctgaggcaggagaatcacttgaacccgtgaggcagaggctgcagtaagctgagatcgcaccgctgcacattccagcctgagtgacagagcaagactccatctagaaagaaagaaagaaaaagaaagaaagaaagaaagaaaggaaggaagggggagagagagagagacagagagagagagaaagaaagaaaggaaggaaggaaggaaggaaggaaggaaggaaggaaggaaggaaggaagaagagagagagagaaagaaagaaagagagaaagaaagaaggaaaagaaagaaggattccctagaagctcaatacatagaatagatgaaagggactagctgcctggggctgggggctcagctcagcatctcatccctctactactcttgacagtatacctcaatcctggggcatcataaagcatcacttgaaaagtagcaactcaacactctcacaggacaagggaaaggctcagagagggcaagcaatctgctcaaggtcacacattaagtttggatgaatgcatggctccctgcccagcactccatgccctgcaggaggggcaatgcccatctatctgtcaaccaggctgcagacctgacccacatgtccaggagcctgtatgctggccccctctacccttgagtgcccaggaggggatctcatacactctcaggctaacagagaggctgggctttatgctaagaccagaagaggatggaggtgtcctagtgtacattttaaggtcattttaagatatcatggaaagaagccagatttgaggcctgtcaatgctggggcaagttttaattccattctttattaagtcactagaccactctttctgctgtttttgtttttgtctttaatgaacatagtcatatgtgccttcctgggtgttctcatggaaggattggcaagaggaggtgttgagggctgtgcacaccctgcagtctccgtggctcaccaccacactgacgcaaggggctcagtgacccagacgtgtcagtacagtgagtgggcgtcttatgaagagctgtctggcatacggaggcgggcagcagaagccattcctgacgtggctttgatagttcatggaaataaaaagagcccatttctttctttctagatagactttctgtacacagaggcccccaacacagggatggtgaggtggggcaccacccagtcagactgtggctctgttggaccagaacaaatttgctgacaaaaccaggctataaatggggtttggcctaggccaggtcctggatacctctagatcatataagcaggctggcctagcaaacattggcaatgaagaaagagtggtaaagacaattattttaatcctagccattacatagaatggggaaacagtgactaggaaacaggccttttcttttcatttcaagtgtggatacttgagaaaggcaggtttcatcacagaaggtggaggtagatggaaactttcatgaacatcctaaaggtcacccaggcttctaggcacagggactataaagtccgtgatttctttattgcatcgtatttcccagcaagagttacttttcctttttattcgtacatgtgaatcacagcattactcataaacttatcaagcaagatgggaatcagcatttcacctgacacagcatttgccagtgacctgatctgggatctcccctcactgtcagtcacttgtccagggacatggaccccagaaccccacactctacagctcccaggcatttggtctaatggggcttggtctctctaaagagatctccatgatgtttttaatttgctattaatgtgctcctccttagctcctgttccctccttagctcctcaggaaagccaattgccttagggtgggtcacaattcgacggtcatttgtgtgactgagtggtgagtgaccgtctcccctactggactataagtgccttgagagcagccagcaggtttgtttctactctcggctggggctcagtagatgctccatagggaaataaaagggaacagttagaaacagaagaaaaaggccaggtgtggtggctcatgcctataatcccagcactttaggaggctgaggcaggcggatcatttgaggtcaggagttcaagaccagcccggccaacatggcaaaaatctcatcttgactaaaaatacaaaaatcagctgggcgtggtggcaggtgctgaaatcccagctacttgggaggctgaggcaggagaaatgcttgaacccaggagatggaggttgcagtgagccgagattgtgccactgaacttcagtctgggtgacagagcaaggctccagctcc

SEQ ID NO: 274 - DNA, 1751 bp, human
ggcacgaggtgacaaggcaggtagctaagtgtaaatgtgcaaagcgatttcaagttgagcagattggtgataataaatacaggtttggagactcccagcaactgcgactggtccggatcctgcggagtactgtgatggttcgtgttggaggtggatggatggcacttgatgagttcttagtgaaaaatgatccttgcagggccaaaggaaggacaaacatggaactgcgtgagaagttcattttagcagatggtgccagccagggtatggctgctttccgaccccgaggccgaagatcccggccatcatcacgaggcgcttcacccaacagatccacttctgtgtccagtcaggctgcgcaggcggcctccccacaggtccctgccaccaccacacccaagggaacgccaatacaaggaagcaagcttcgacttccaggatatttatcagggaaaggcttccactctggggaggacagtggcttgataacaactgcagctgccagagtccgaacacagtttgctgattccaagaagactcccagccgaccaggaagtcgagctggaagcaaagctggcagcagggccagcagccgccgaggcagtgatgcatcagactttgacatttcagaaatccagtccgtgtgctcagatgtggaaactgtcccccagacacacagacctacaccccgagcaggttctcggccatccacagcgaagccttcaaaaatccccacgccccagaggaaatcacctgccagcaaattggacaagtcctcaaagagatagtgcaattggttctaccaaggcccttccttgagcatttattatttaagtttgaacgatgtaaaatatggtgtagaaattcttgtgaaatattgcaagaggcgagtttaaaattctgcagatggccttatttgtgtatttgtctttttattttatctgtataattttttttgtcagatattctggggttaaagtcacatcatatgtgaggaggaaaagtttaacatgaactaacatttctgcactgtaacgtgccgggcacacactaaactcagttactgtacctacaggtaagtctacatcctctctgacagccacagcactacatcaatccctgacgttagggatacctcatgacattttcctgtttttatggaaactctgagaagctgaatgatacatgcaggggatattttttgagatgatttaaatgtaaaccaaaagatggaagacaaaaagacaaacacacccacacgcagtctttgcagtatctgacagagaactcacaggaagttacttcaagcacttgccagtactatgatattcaagtaccttgcagcatttctctgccattgctttcaatgaggccagaggcatcctggatattagacctattatactgtaagaatataagtataaagtgcgttcatatacatgtgaggttttcttttgcttgagtggacagtagcacctgtatcattgaactcattttgtatcagagcaattttgcttgcagaaagctatgaaataaaacacgtcccttaactgcattgctatggaattaattttttttccccagggaaaactagtgtatttttttatgagcaatatcaatttggagtgaccaaaagatacttaaaaatgggtttattttgatttctcatctgaaataatcatgttctggtattatatctatctatatttaataaatatatacattttaatttaaaaaaaaaaaaaaaaaaa

SEQ ID NO: 275 - DNA, 813 bp, human
  misc_feature (688)..(688): n is a, c, g, or t
ttttttttttttttttttttttttttttttttaaacaaacaaaaaagaagtttactaaatttaaacactgacatcctgggaagatgccagtctttacaggcgtttgtaaaagtaaactggggggagtatgttacactaatacaaagttttacaaatgaatacaagtgaaatatttaaattacaatgaaatagaggaagattggggctttgtcctgggttggtttttttagcagtcatattgctgttggggagagcagcaaaagccacatatgcctccaagcactccatttattacttgaataagacacaagatgaattcaattccaccaagagccaagaggatagaaaacagagatacattccattccacaatgtgcttgggttcagtgcactcggaccatgtggaggtatccaaaagggtcttgcccttggggcttggaaaaggggtatttccactggccgagggaatcaagacatagtggtccttctgctaagccaagggctgccacaatgacacagtagccagatcctgcaattccaatgagagcagccaatacagaagaaagcatcgcacatcgtttgccacagttttcatggccacagcagccacagcagtcatcctgttccagcccaatgaagacaaatgctggcaggagcatcagcaggccaccttctacgatgccagaanaagaacacacgaaagcgggttgaggggttttgggaggcattctttgtttcccccttggggaaataaaagcaaattttaacccgggatgccccaggaggcgggccccaaccaaaaaaatgtcggat

SEQ ID NO: 276 - DNA, 590 bp, human
  misc_feature (526)..(526): n is a, c, g, or t
  misc_feature (577)..(577): n is a, c, g, or t
gttgggatttcagatagagtttggtttataaaaagcaaacagggccaacgtccacaccaaattcttgatcaggaccaccaatgtcatagggtgcaatatctacaataggtagtctcacagccttgcgtgttcgatattcaaagactgttttgctccattccccagtgtgtttctgtaaaaaaggacaaaatgtacatgatcatgacattacaattacttagacaactctgacttaacaagttaaagaaaacctttttactctaaagaagcattcatcgtgccatgttattattcatgtatatgagacctgctctacttcaaagctgtaatcttcttagttgataaacaatattcttaaacaaatgccttgtaaggattcttagtaaatgcagcagggcaattgctatagaccagtgcatcctcaggaggcctggttccggccattgctaacaggtttataaatggtttattaaaaagaggataggtctctcacaatgaaattcgctaatattagaagtgagttttncctttggtccaaataaccataaccaaatggagagaattggaaggttacccnttaaaattttaaa

SEQ ID NO: 277 - DNA, 2186 bp, human
  misc_feature (29)..(29): n is a, c, g, or t
  misc_feature (43)..(43): n is a, c, g, or t
  misc_feature (53)..(53): n is a, c, g, or t
  misc_feature (66)..(66): n is a, c, g, or t
  misc_feature (69)..(69): n is a, c, g, or t
  misc_feature (93)..(93): n is a, c, g, or t
  misc_feature (101)..(101): n is a, c, g, or t
  misc_feature (109)..(110): n is a, c, g, or t
  misc_feature (170)..(170): n is a, c, g, or t
  misc_feature (193)..(193): n is a, c, g, or t
  misc_feature (228)..(228): n is a, c, g, or t
  misc_feature (233)..(233): n is a, c, g, or t
  misc_feature (1988)..(1988): n is a, c, g, or t
  misc_feature (2028)..(2028): n is a, c, g, or t
  misc_feature (2077)..(2077): n is a, c, g, or t
  misc_feature (2084)..(2084): n is a, c, g, or t
  misc_feature (2136)..(2136): n is a, c, g, or t
  misc_feature (2162)..(2162): n is a, c, g, or t
gggaatccaccttcttgttttaagggagngacttgaccttttntaaaattttnacagtaatggagntanccagcattttagggggcaacttantatgtacnaacttgcnncgcaatcgttcaatgatcagtttcatctgtaagtgaggagcactgtaataactaccttanggggtcattctaagagattaaangaggttctgctcataaagtgtttaacttcatgccngactntgagtaaacactcaataaatggtgattgttattatcagccaaagcatatttgcttccttccagcatactagctctgttgcctttggttaagttatataaccttgctgtgcctcagtttcctatctgcagcttgggaggaataacagttctgaactcagagggtcgttgtgagtattgaacaagtcagaactcagaacactgcctggtacatagtaaatgctcaataaagtcacctattcattcatacgatggtttttcctctaattctctcaggtaggcacggcccccaccaggcgccatggactggaagacactccaggccctactgagcggtgtgaacaagtactccacagcgttcgggcgcatctggctgtccgtggtgttcgtcttccgggtgctggtatacgtggtggctgcagagcgcgtgtggggggatgagcagaaggactttgactgcaacaccaagcagcccggctgcaccaacgtctgctacgacaactacttccccatctccaacatccgcctctgggccctgcagctcatcttcgtcacatgcccctcgctgctggtcatcctgcacgtggcctaccgtgaggagcgggagcgccggcaccgccagaaacacggggaccagtgcgccaagctgtacgacaacgcaggcaagaagcacggaggcctgtggtggacctacctgttcagcctcatcttcaagctcatcattgagttcctcttcctctacctgctgcacactctctggcatggcttcaatatgccgcgcctggtgcagtgtgccaacgtggccccctgccccaacatcgtggactgctacattgcccgacctaccgagaagaaaatcttcacctacttcatggtgggcgcctccgccgtctgcatcgtactcaccatctgtgagctctgctacctcatctgccacagggtcctgcgaggcctgcacaaggacaagcctcgagggggttgcagcccctcgtcctccgccagccgagcttccacctgccgctgccaccacaagctggtggaggctggggaggtggatccagacccaggcaataacaagctgcaggcttcagcacccaacctgacccccatctgaccacagggcaggggtggggcaacatgcgggctgccaatgggacatgcagggcggtgtggcaggtggagaggtcctacaggggctgagtgaccccactctgagttcactaagttatgcaactttcgttttggcagatattttttgacactgggaactgggctgtctagccgggtataggtaacccacaggcccagtgccagccctcaaaggacatagactttgaaacaagcgaattaactatctacgctgcctgcaaggggccacttagggcactgctagcagggcttcaaccaggaagggatcaacccaggaagggatgatcaggagaggcttccctgaggacataatgtgtaagagaggtgagaagtgctcccaagcagacacaacagcagcacagaggtctggaggccacacaaaaagtgatgctcgccctgggctagcctcagcagacctaaggcatctctactccctccagaggagccgcccagattcctgcagtggagaggaggtcttccagcagcagcaggtctggagggctgagaatgaacctgactagaggttctggagatacccagaggtcccccaggtcatcacttggctcagtggaagccctctttccccaaatcctactccctcagcctcangcagtggtgctcccatcttcctccccacaactgtgctcangctggtgccagcctttcagaccctgctcccaaggacttgggtggatgcnctgatanaacatcctcaagacagtttccttgaaatcaataaatactgtgttttatacangttggctctgtctctggttctcccanactcccaaccactgacagaaccct

SEQ ID NO: 278 - DNA, 1196 bp, human
ctgaagtatttttagttatataagattggaactaccaagcatgtggctcctggtcagtgtaattctaatctcacggatatcctctgttgggggagaagcaacattttgtgattttccaaaaataaaccatggaattctatatgatgaagaaaaatataagccattttcccaggttcctacaggggaagttttctaatactcctgtgaatataattttgtgtctccttcaaaatcattttggactcgcataaactgcacagaagaaggatggtcaccaacaccaaagtgtctcagactgtgtttctttccttttgtggaaaatggtcattctgaatcttcaggacaaacacatctggaaggtgatactgtgcaaattatttgcaacacaggatacagacttcaaaacaatgagaacaacatttcatgtgtagaacggggctggtccacccctcccaaatgcaggtccactgacacttcctgtgtgaatccgcccacagtacaaaatgctcatatactgtcgagacagatgagtaaatatccatctggtgagagagtacgttatgaatgtaggagcccttatgaaatgtttggggatgaagaagtgatgtgtttaaatggaaactggacagaaccacctcaatgcaaagattctacgggaaaatgtgggccccctccacctattgacaatggggacattacttcattcccgttgtcagtatatgctccagcttcatcagttgagtaccaatgccagaacttgtatcaacttgagggtaacaagcgaataacatgtagaaatggacaatggtcagaaccaccaaaatgcttacatccgtgtgtaatatcccgagaaattatggaaaattataacatagcattaaggtggacagccaaacagaagctttatttgagaacaggtgaatcagctgaatttgtgtgtaaacggggatatcgtctttcatcacgttctcacacattgcgaacaacatgttgggatgggaaactggagtatccaacttgtgcaaaaagatagaatcaatcataaaatgcacacctttattcagaactttagtattaaatcagttcttaatttcatttttaagtattgttttactcctttttattcatacgtaaaattttggattaatttgtgaaaatgtaattataagctgagaccggtggctctcttcttaaaa

SEQ ID NO: 279 - DNA, 711 bp, human
aatgttccctgacctgaccaaagtttattccactgatatattctttatacttgaaattacagacaacccttacatgacgtcaatccctgtgaatgcttttcagggactatgcaatgaaaccttgacactgaagctgtacaacaatggctttacttcagtccaaggatatgctttcaatgggacaaagctggatgctgtttacctaaacaagaataaatacctgacagttattgacaaagatgcatttggaggagtatacagtggaccaagcttgctgctgcctcttggaagaaagtccttgtcctttgagactcagaaggccccaagctccagtatgccatcatgatgcctgctaaggcagccaccttggtgtacatgctcacagaggctctgttcatggagcagctgctgtttgaaaaattttgaaatgcaagatccacaactagatggaaggcactctagtctttgcagaaaaaaatgtacctgaatgtacattgcacaatgcctggcacaaagaaggaagaatatcaaatgatagttcgactcgtctgtggaagaacttacaatcatggggaaagatggaataaaaacattttttaaacagcaaaaaaaaaaaaaaaaaaaaaaaaaaaaaaaaaaaaaaaatccgggggcttttttttggggggggggaaaaagggtttttaaaggggctgggcagtttttcgggcc

SEQ ID NO: 280 - DNA, 711 bp, human; identical to SEQ ID NO: 279

SEQ ID NO: 281 - DNA, 1561 bp, human
tcttaattttacaagcgaggaaatgagagtgtttcttgtaggggtgtagtgagaatttaataaaacagtttaaggaaagaaaacaaaaggtagtattgctgcactttctagatggtaaaaagcaaaccaccatgtctgtttaatatatatcacctgctggtccctcggtctagcaggctgaactgtgtgcctgggaattttcttctcgctgtgtgcacccctttacgtcacagggtggactctcttcagagtcctagtggagcagctggccaggctgacatgatctgacaacattgtaggttaccactaccatctctcaccgtctcactttcttcctaggggtctcctgctgccagctaagtgtgggagaacttgtgcacgtatctcccctccgaatcccaacgatgggtaacgccagctttggctccaaggaacagaagctgctgaagcggttgcggcttctgcccgccctgcttatcctccgcgccttcaagccccacaggaagatcagagattaccgcgtcgtggtagtcggcaccgctggtgtggggaaaagtacgctgctgcacaagtgggcgagcggcaacttccgtcatgagtacctgccgaccattgaaaatacctactgccagttgctgggctgcagccacggtgtgctttccctgcacatcaccgacagcaagagtggcgacggcaaccgcgctctgcagcgccacgttatagcccggggccacgccttcgtcctggtctactcagtcaccaagaaggaaaccctggaagagctgaaggccttctatgagctgatctgcaagatcaaaggtaacaacctgcataagttccccatcgtgctggtgggcaataaaagtgatgacacccaccgggaggtggccctgaatgatggtgccacctgtgcgatggagtggaattgcgccttcatggagatttcagccaagaccgatgtgaatgtgcaggagctgttccacatgctgctgaattacaagaaaaagcccaccaccggcctccaggagcccgagaagaaatcccagatgcccaacaccactgagaagctgcttgacaagtgcataatcatgtgagccctgggccttaagagccagctcttcctatcctgtagcgtgtagaaaacgtggactcatttcactatgttacatgtacatggttgattttgtgctgttgtttggactgtaacatccatgttgtcaatacgtataccttgtaagtggataacttttctttttcccaggccagagaattcaaattgttaaaacattggcatttgaagaggagaacaaaatgtagcatgatgtatttaaagtaaggcctttagtaatgaatgtaatgagagaaaatgttttgaaaagaacaaaacatcaaaatgaatagaaagaaaaattggaaggcgtccttttggtaacccgattattgtgtattacctttaaatatttcacatcctgtaagtgcttaatcatatcttttaattgtgtatttaagaaaagtgttttcacaacaaaagcttttgataaattgctgcgtgacatatact

SEQ ID NO: 282 - DNA, 198285 bp, human
gatcaggctctttctctctgtaaacctgctcccatggcattcttttctgcttcaattcagtccatccctgaccacccacccagccacccatgctggaaatctgagatatctttgactcctccaccttcccactcccacagctaatcagtagccaaaccctttagattctacttcctaattatcttgatattctatctcctctgcctcctctaattatgacttaattcaggctcttattatctgtcatttaaattattgctgtattgctacaggagtggtgtgtatatgtgcaactgttcatcttggtatgctatagactcttgcccagcagttttgcctcaattctttaaaagctccagttcattgtttgaaatatcaatcagaacattttttccaaaatgctaaaatgattgtcattccccagttttaatatctctatcatctgctaagtaaaagcaagctcctccttgtggcgtagcagggcccacgtgatctggcccttgcccgaatttgtagcttatcacaacatccttctaccccccattacctcctattatacaggaacacccaagcgaccttcacaacattcatatcaactagtacacagggtctccaaagaggacctctggatgcctgtgatctttgtacttctgcctaccctttgccctggcgtgtttttctcttccttcatgttctgctggccaaattgtttttccttcaagtcttaggagcctgcctgattatgttcctcctattccgcatcctcataaaattactgcgacttccaaaacacttggcacattcttatttgaatacattacattgttgtgtaattatcccttggccccctcccccagcactagactctaagctctttgaaggcagactatgcctattcatctttgtatttctagccctgggcccaacacccagaatttcttgtattttcaatatatgtctgccaaatgaattagagctaatgcctgaaggagaataagtttttttgagaaagaggaagagccaggagggaggagaaggcagggtccgaagagccctgggggtttacttggggaagatgcggttccccattgcagcattctgccaggaggtggcactgctctgaagagccagctggtcgcttacagactgaggctgacagcttgaaaccaaagagggaactccaccaggaagcaacattcctccactgggcttcccagcccagttacatgccatactctgccctggtcaaacagccaagtcttcaggaggttactggccccaggcgtctccccagtgactgatgatgttaaaccctacgcttctctgattggtttagacaaaatgacaagggcacctattggaaatgatctggcaaaacatgatctaaggccaccctctcggggagggagttggggaagctgggttggctgggttggtagctcctacctactgtgtggcaagaaggtatgggtcatgaacagaaccaaggagctgcgctgctacagatgttaccacttctgtggctgctaccccactcctgggccgtccctgaaggtaagatggtactcctatttacttccatcctgaacctagggagcccactcagctttgtgaggaaaagcgctgtgctttgtgagtggtgggaagtcttatgaggcagtggaaacaacaggggagtggggaaagacagctgctatgtgtggttggtaaacgatatcagtgatgctttgcatgttccatttaagacaatctcttgaagcggagattgttctctccattttacaaatgaagaaaatgagactcagagttatttgtgcaagttcacaccattggaaagtggtagagctgggatttgaacaaagtgaatgttattttcactcctccactcaagattctactctgctttctatcattaacttatcttgtgattcttgaaaagtgtcttagtttccttctctgtagaggatggggcagaatggaagaataatctggaagatccctcttcctccaaatgtctgtttttctgggtattgggttaaaggtttcctgctggctgagcgattcctgccaagagcttcaaagaagagggattattttatgcagttatggggtcacttctcccattgctgtctttgggaggcctggtaggttaaggaacagaagacattttgagagacgcttggtgccaatgaagtggctgaagaaatgtctggatacaggttttccaatttaccatttgtgtctggggatagtgggaggcagtcccatctatggcttggggaggctgtagccattcctcctctttcccttctaagagtgagaaacccatccatggccttctctagtcaatacagtggcctggtatgaattagacaaaggaatcccctttgggaggatacagccctatgccaggatgtatggcatggtgagcagaatgcaggctttcacttgcttctttggctaggtgtctttgtgcagcccccaaacacacaatgaacagtgactctgaatctgtcactttattttatatatatacatttttaaattttttatttgatttaatttattttttttgacacggcatctcgctctgtcacccaggctagagtgcagtgacgtgatctcggctccctgcaacccctgcctctggggttcaagagactctcctgcctcagcctcccaagtagctgggattacaggcgcatgccaccacacccagctgatttttgtatttttagtagagatggggtttcattatgtttgccaggctggtctcaaactcctgacctcaggtgatccacccgccttggcctcccaaagtgctgggattacaagcttgagccaccgcgcccggcctttatatatatattttttgagacgggctcattctgtcacctgggctggagtccagtggcacaatcatggctcactgcagccccaacttcctaggcacaagcaatcctcctgcctcagcctccagagtagctgagaccacaggtgtttgccaccacacctggctaagtttttgtattttttgtagagacggtctcgctgtgttgcccaggttggtcttgaactcctgggctcaagcaatctgcctgcctcagcctcccaaagtgctgggattacaggcatgagccaccatgcctggcctgaatctgtcactttagaaagtagaactctttacttttgccaactggcctttttataggcaggggaagcttggagagatgccataatttgttcttcaccccctttgggagggggagtctaaataacagacacaggaaagggtctcacctcagcccacgctccttaagcaggccttgcttgtttttgttgttttgttttgagacagagtctcactctgtcacccaggctggagtgcagtggcttaatcttagctcccggcaacctctgcctccctggttcaagcaattctcctccctcagcctcccgagtagctacaggcgcatgccaacatgcccagctacttttttgtatttttagtagagatggagtttcaccatgctggccaggctggtctcaaactcctgacctcatgatccacccaccttggcctcccaaagtgctgggattacaggcatgagccactgcgcctagccccaccttgctgttttttaagttggaggagaaggctcccacctccctgaacctcaccctgtgtcctttgcagctcctactccaatgtggccagatgacctgcaaaaccacacattcctgcacacagtgtactgccaggatgggagtcccagtgtgggactctctgaggcctacgacgaggaccagcttttcttcttcgacttttcccagaacactcgggtgcctcgcctgcccgaatttgctgactgggctcaggaacagggagatgctcctgccattttatttgacaaagagttctgcgagtggatgatccagcaaatagggccaaaacttgatgggaaaatcccggtgtccagaggtcaggagttttctggggagtgaagggaggagggctgcattaacctcattgatctgtacactgaataattccccttgataccagctccccatctcaaatactttctggttctcttcatcaccttaatttttccaccagccttggtctgcaccctgtgttcttttggtgggccgaagtacctagcatgtagtaggcattcagaactatgtattgaatgtgatgaattcaacaggtaccaactgatacctactgaatattaacacttgtgctactatgcccagcaagatggatgggaagagtggaaatatctgatgacgtgactatgtcttagtgagaagacagtgcatggttagacatcaatgtgagctctagacaggaagtgctgaaggaagtcatggtggaggggtccagagtagcctggatctggctctgcttctacgtctagctgcagtccttgcctggaagaagacctcccttcagagcccagctcctcgctcatctctgtctcccaaagcctgacccactgtgttcttctctgccctcccctccatatgccatggcccctccaaacacagagataccatctaaactagtctctttttccccctacacttcaatccccccaccagggtttcctatcgctgaagtgttcacgctgaagcccctggagtttggcaagcccaacactttggtctgttttgtcagtaatctcttcccacccatgctgacagtgaactggcagcatcattccgtccctgtggaaggatttgggcctacttttgtctcagctgtcgatggactcagcttccaggccttttcttacttaaacttcacaccagaaccttctgacattttctcctgcattgtgactcacgaaattgaccgctacacagcaattgcctattggggtgaggctttctccctggaattctggtccttttgggggcaaaaagggatagatccatgggaggaggcttctttctccactggtaccttgtttagtccattcctaccctaagcccatcccagtctcccatgtcatcccagacacccacgtcatttccctgggtgggaggctccctaactaggtccccaggctgagccactcatttcctccagtaccccggaacgcactgccctcagatctgctggagaatgtgctgtgtggcgtggcctttggcctgggtgtgctgggcatcatcgtgggcattgttctcatcatctacttccggaagccttgctcaggtggtatgtcatctggagggggcgggtgagcctgtgggagccagatacagtggtgcatgcgtgcatgtgtcaggattattttgtggcatggggggacatatagcgatcctcaggcccttgggtgtgggggcctgtatccagcaccatgggggcacatcttcccagttggggacccagttacacacacacagttatgggtcacaagaattgctttgagtgaaaaaaggaatcatggggtgctgtaggaagggtgcttggagatgatttgggaacaaggagagatcaacttctgcagggtgtggtgcaggcagggcgagcaaggcctttgtgggggaggaggaggaggagaaggaggaggaggatggatcccctgatgcctttcctccatccctgtctctcccccagactgattcttccagaccagagtttgatgccagcagcttcggccatccaaacagaggatgctcagatttctcacatcctgcccaggatctcctcttagggtagaagaagtctctgggacatccctggggtgtgtgtgtagatttcccacctggggactctgctgtccctgggcttgcatcccagggatcccagagtggcctgcctatcacaaccacatcccttccccccacaaggcaataaatctcatttctttatatcagtgtggcttctttcttaactcatggtatttgtttctggatatctcaacttgagtgggttgtcgtttcaaattcagcatgccttaacctgaacacagcttgacctcgttagggagggaaatagggaaaacccctaatttgccagctgagctcttattccctggtcttggcggtacatgatgtttttccatctatcggtttgtgcaaaatatgtgagaaacgaaggcagagttattttctaataatctgcttacaaaatggttaaggaagctgcttgtgtgttttgtgcgtgtgtgtgtgtgttgtgtattttactgtttgtgaaaatgtttatgtctcgtataggctgccctgaggaacatataactcccttcaaccctcaccgtaactgagaaacagaagctcagggatgggaagaataagctcccaagtgctataccaatcagttatgtcagttctgggaaaacagtatcatgaagcccctaacatgaagtgaaaacagcctggaagggcaaagaattcacatgtctttcctgacaatctgttccttggcctgagtgaactgtccaaggagaactgcacaggtgctgtcctgggaagataacgaaaggtggcagcacatgaccactggtggtaaattgctttgcatatgctttctttcttgcattccttagggtctgggagttgctttggatgacagggtggcaataaagttgagagggcaattatttggtgagggagtttctgttcttggcattgtactagagtctaatctaaaagaaaatattaaattctccctaagagaagttgcactgtctctgaaccatctcatttctaacagcatcatgtgtaccggttaagaagcatgggctctggaacctgactgctggggattcaatcgtaactgtcagcgtttagctgtgagcccttgggcaagttacttaacttgtgctttggtgtcattttctgtaaaaggatgatgataacaatggtgtcccccttaccactctacacccaccatgttgccaacatttgaaagtcaaataagtattagcgaggataaaggaaaatgtgaactgtaatatcttggtctgttggtgggaatgtaaactgtttatgatgcccgaattacagaaattatgaactagttgagtgaaaaagttaatataggaaataaggcagcatatcctcatgctgtgaagcttaaataagttaatacctacagaatgcttaaaatagtgtttggcacatagaaaatgtgctgaataaccctaacccttatcattattggtcttgatcttcagaggagaacttagttgcctcgtagacttctttctcttttctgaaaatatacctcaatactagcttcaagtattgtattttctccattttagatgtttttctttttattctcatgttagtaattctagatgtggtgctttctagttcttcctaatttctctgtctctctgttttccaacttatctagatatttcctgtcaggcaagacttaaaagtgctttattatgctgtgtgactttagacaagtcacttcccctctctgggcctcaaagtcttcatctgtaaaatgatgggcttagattagatgctctctgatgaaaccttctatgatactgttacttaagtactctagaagcactcaggtatcctctctagtctggtgccccttttctaatatactatattacgcactattcccagcaggaatgctattcttgtttaaatcttttttcctcactcttccttgaggtattatatctgattttggtttagggcatttgcccaggctctttcctctcatacgggagctttctctattctgctcatcttgttcctgtcttaacccactccataggtccaactccagttcaacttattccatgaacctgcccctaatttctctttattgaaatcttccaagacttaaagcactcaacctaaggattgggatatgccgctttatttcctatgttaattttttcgcccaactagtttataatttctataattcagggatcataaacagtttacactcccatcaacaaagcaagatagttcacatttccctttatgctcactaatgcttgtaattatttgactttcaaatgttggcaacatggtgggtgtagagtggtattttgttgttttaatttgcttttctctcattactaatcagtatcatattgtttgattattttggctttttaatatgtgttactattaagaagaacaagtctccattccttcaccaccttcccaaaaaatttattttccttttctttatcaaaatatcctaaaatactcttggactttatttccttgtacattcataatcagttgttaaattctcctgaaacctactgttactttaatttggggtagcatttaggttagagatgtggggagaggttgtcattatgttagcatggcctatccatgaatatggtatatctctacacctctcaggtctttgtgcacttcaataaagttttcttttttcttaaaattcttatatttgatatgttaattcataaatatgctatggtttttattgttattataaatagtaggcaattttcagttattttccaattgattattggcaatacaggatttaaagtaataaatcctgagttcaagtaatggttttattacttagtatctgggtaaatctgggcaaccacttaacctccctctgcctccattttctcgtgggtaagatgaagatagcattcttcaatagttgtggtggcaaaaaataaaattaaaaaaggaaaaatagttgtggcaaatcagatagactatccctagtagttcaaataatttgactgtaggttggaaggatggtgaactgactacagaaactataatccaaaggtcagggtctagagcagtgaatcctgacagggtaggagggtgtgtgtgtgggcggaggtgaggtaaggggtagatggcaggggtggggtggggattggacagattgggcaagtaatataatcttggcaggatgtaggtgtgtgtagttttgaaaagacactgaagtcacgaatgtggtcttatgctatgaggcgtgattaactggttgagcaattttgtgtttataaaatggagacttcagttaaaaccgtctgccccaagaacctgcgaactgacatggagcaactttaggaagtgcctagaagagatttattattatggccatactctcagaaaaaaacaagaaatcacatttgtgacttcctccaacgtgcagtgccagtgacgttattgtagcttgtctttgttttagctaacccaggctctcgtaggacacctcctccctgatggcacctcacagcattgtcaagcttgtggagctatacaccagacctacaatgccaactgccttcctcctctccaacacaaatccagcccagtattcaaggctcattccaggccctctcgactgagagtactccctgtctaccatgtccatggtgatttctctcttctcttttaagaccactggccttattgcttacttactttaatataaactatttaaagtgtttgttctcactccccaattgacgtacaagcaaagcgatatgggggcagaatccatatcttctcactctgtattttcccagtaatgctttgcacacaaaccctgggactagtttactgcaggcatgtggtggtcaggctaagggcagaggcaatgggaaaggagaggactcactctttgggtggttgtgtagaggcaataaaagaaaggcaacatgtgggaacctggttggggctccatacctcttcggtcccggtgctatatcaataattaacaaataagtaacaatggacagagcaactgaaatgttattttgaattggctagaggtggaaagacagagctatatctgtaaaaatggaagggttgggaggaggagaggaaggaaaacactgctgagcacaggtgtctgggttttctgtccttctttattctaaaaagctccctcagtgtttgaattaatagagaagtgaaatcctctcctaccatttcctgttgtggcctcacagaaggtttcacatctcctttgactgccggagcagagatctagacataagagggaactacattcagccccactgttactggctagggccatgttcagtgctggcacaggaccacacagccagtgctcccttgccagggctaggctttgtagacattgaaaaggatcccaggacttggttcctataaggttaggctaacagcttacctgggcaggatggggaggaatgtgagggggaaatgtattgggggggtgtgggggaaaattcagttttgaaacttgtcaaaagagaaagtggaagggacggtggttctcagagcagaaggaactctgaggacaggaaagataagacttgggtgaattgggttatggattgtgactcttctctttctctctttctcagcggaggcctcactaactccctttatttgagccatcccagttccaagatgtagtgagtgtgtgggcatgctcaagagagtgtgtatgtgtgtgtgtgtgtacacacgtgcatgtgtaacagctgtataagaagaggagttacagcctttagaccttgggtgtgaatctttggacctgttttccaacctgggaaatgaggacaattaacaagttttttttttttttttttttttttgagacagtctcattctgtcacccaggctggagtgcagtggcacgatctcggctcactgcaacctccacctcccaggttcaatcgattctcctgcctcagcctccagagtagctgggattacaggcacgcgccaccacacccagctaatttttgtattttttgtagagacggggtttcaccatgtttgccaggctggtctcaaactcctgacctcaggtgatatgccttcctcagcctcccaaagtgctgggattacaagcgtgagccaccatgcccggccaacaagtcttttaagatgagatgagatattatagaaaggacctacctagcactgtatctgtagaagctctacagattatgcactccccaccccatattctgcccattccaacacacttgacagttcgttagcagagttagagtatataagcaaggtgagtgggggcagtggctgggagctatggcagagcttcagttaatctcaattagttacacaacgaatctttcgtttttggtaataatctttgtatgcattttttatccccattttcttcataggtgttagattttcctgagatcagggactttgagggagggcaggtaagtgtggtgtcaaggggccccttccacaatcctgttttgtttagctcactatttaataaaatccaagagttctcagaaactaagatgtgaagaggcagccctgaaacctactggggagcagaaggaagccaatttagagtttcaagttagtgatggaaaatccatcaactgtatagttcacaatgggatagaagaatgaattgccgtttaaaatctgctttttcaggccaggcacgatggctcatgcctgtaatcctagcactttaggaggctgaggtgggtggatcacttgaggtcaggagttcaagaacagcctggccaacatgatgaaaccctgtctctaccaaaaaaaaaaaaaagacaaaaactaaccaggagtggtggcacatgactgtaaccccagctactcaagtggctgaggcatgagagtcatttgaacccaggaggcgaagattgcagtgagccgagattatcccactgtactccagcctaggcgacagagtgagactttcaaaaaaaaaacctgtgaaaaaaataaatacgcaaatacataaaatctgccttttcaagacacacacgtgaccaagaagcatatgaaacaatgttcaacattactaatgattagaaaaatgcaaatcaaaatcataatgagataccgtctcacaccagtcagaatggctattattaaaaagtcaaaaaataacaaatgttggagaggttgcagagaaaacggaaggcttatacactgctggtgggaacataaattagttcagccattgaggaaagcagtttggcaatttctcaagaaccttaaaacagagctaccattcgtcccaggaatcccattattaggcatatacccaaaggagtatacattgttctaccataaggacatatgcacatgaatgctcactgcagcagtattcataatagcaaagacatggaatcagcctaaatgcccaccaacagtagactgtataaagaaaatgtggtacatatacaccatggaatactccacagctagaaaggtcgtgctcacgtcttttgcagcatcatggagctgggggctgttatcctaggcaaacctacacaggagcaggaaatgaatactgcatgtctcactttatagtggagctaacatgagacacatggacacaaaaaggaataatagacactgggccctacttgagggtggaggatgggaggagaagaggatcaaaacactacctatcagatactatacttattacctgggtgatgaaataaatttttacgccaaatcccgatgacacacaatttacctatataacaaacctgcatgtgtacccttgaacctaaaacaaaggttaaaataatttaaaataaataaaaaataaaatcttacttggtattctcaaaaaataaaaaacaaaatctgtcttttcaggggaagaaaagtaggaaagctttatctcattttcctagtggcttcataatgcagggacctgcccccagggaacagggtatagtaggggaaacacacaggggtgtttagagtttggcgaaaggcaggtgagctctgggcactgacccgtcaccagctatttttcaaggagtctgagaggtgttaacctgcggtctaccccgtgagattgctcagagtgtaggaggatatggtttactagctccggaaagcagctattataactgaggaggaaatgaagcttgactggctagaacagaagcaacaatggaggcccatggagggattttccaggcccctattcctgatctccatggtggcgctgcttcccttattctgcagtcttgctttgagaccagacaattctgtactctgtctgtgccttcttccttctcagcagccctgcctctgccacctgccccagaagggctctgggtcctctcatctcaggacagacaagggtttttgtaattatcttcttgggtaacctccctgtaaggaataggagaggttatctggtcctggtcttttgggagagcattgagaagaaaaagttaaaccagtgggcagcccaggctgcatacatcctgggaatattgcgattattctctccagtaatctacggaaatctactggttgttctgcagaaaaagaattaagagagacaaggagacctgttgtctaagactaaggcaggatgacgtttacctagtaactgatgatgctaggctgaggcactcagtgatttgtctctacatttgtccctgcctacctagccaatctgtccctgtttgggacactggactcccgtgagctggaaggaacagatttaatatctaggggctgggtatccccacatcactcatttggggggtcaagggacccgggcaatatagtattctgctcagtgtctggagatcatctacccaggctggggcttctgggacaggcgaggacccacggaccctggaagagctggtccaggggactgaactcccggcatctttacagagcagagcatgatcacattcctgccgctgctgctggggctcagcctgggctgcacaggagcaggtaaggacacttcttctggggactctcccttcccctgctcctgtttcagggtaagggtgttccgttttgtaattgcatttgacaccccagatagtttgtctccctggtatacattcctatagcactttgtactttgtagcaattttaatgtaattaatctgtataattatctgtgcagtgtatattccctgctggaatataggcaaggacaatgttcatcttatttattgctgcctcctcagctcctagcacagtgccttgcatgcagcaagtgcttcataaatatgtgcgaagtgaatatttaatatttccagcacaatacaaggctgactctttctcttgaccctttttctctctcaataatttgccttactgaaggtctgtgttctgggcaaattgtcatgtttaaacatgcaaataatctcggggggctactcctatccctgtgcttagtcttgcataaagaggagactggatctaaaaacttatctactacttctactgactccctcaaatcagactttcagaaacttcagtgtatgagcttggtcagtagatgttccctgagcaggaaatctgtgccagactagctggatgtcaccaaggcttaggttctgagctgaatataggaaaaatcaactttttttcttctatatgctcacactcaacacttctttgaccaactgtgtgaggttttttttttttttttactcataccaaccaattctcctatattagctggatatcctataattcaattccattgtgacattaactagagttaacatagacaccaaaggttaaagactcagtcccataagactgcctccatttcagacaccaatcacaagtagtaggttcccaaattacccacatcttctgtccaacttgcctacaaatcagaggttcccatgaccccctccttggggttggtaatttgctaaagtggcttatggaactcaggaaaagtttacttattattgtagattttttacaaaggatattttaattgataataataattataaatattcatggggtggataatgatgttttagtacatgtaatgtacagtgatcagatcagatcatcatctcatttatcatttctttgtgttggaaacattccatatccttcttctagcgatttgaaatgatataaagtattattgttaatgacagtcatcccacagtggtatagaacactagatcataattttgcatcctttaacaaaggatattttaaagcatacaaaggaacatccagatgaagagataccagatctggaagggtcccaatcacaggagctctgtccccacagaattggggtacttcacctcctggcatgtggatgtgtttaccaactgagaagttctctgaactccatagttccgggatttttatggaggcttcatcatgtaggcatgactgattattaactcaatctccagccccttccccttcagggagtatgggggatgggactaaaagttccagacttctaatcatgacttggtctttctggtgaccagcccctcctgcaggagcccaccaagagtacctcattagaacaaaagacactcctgttatctaggaaattctaagcgattaggcactctatgtcaggaaccagggtcaaagacaaagctctgtgcagagctcctaaatatacgtctgtatgttttatatatttattatttgtgtatatttattatttatatatttatttatttattgccaggccagtagaagacattgacctgttctcccttccctggctcctctaggtggcttcgtggcccatgtggaaagcacctgtctgttggatgatgctgggactccaaaggatttcacatactgcatctccttcaacaaggatctgctgacctgctgggatccagaggagaataagatggccccttgcgaatttggggtgctgaatagcttggcgaatgtcctctcacagcacctcaaccaaaaagacaccctgatgcagcgcttgcgcaatgggcttcagaattgtgccacacacacccagcccttctggggatcactgaccaacaggacacgtgaggagagaggggtgcagaggggctaccaggaagtgcagttaggagggcaggccagggaggatcccacagtggcccaggggtttgagatttgagcagcaaataagagaaaatgtgtggatctgaaatgtagaaagacggaggattgaacctcaaggggaacaaggtggctgacgtgagtggaacaggagtaaagaaggggaggtgaggcttgaaccgcgaggtgccatgtggggagcttatgcagaggctggggcatctcaggatgcatacccaagatgttcttgccttgttatcccagattttgatgttccagatctgatgtgggcccaggcatgggaatatttggaatcccaggggattctgacacatgctttttctcacccttaaactcttgcattgacaatggcttgaagtttgtgaaagtaaacttgaagatctccacagtacagaacagtgtgtctcaagggtggtttctgaaccacctttctcagaattgcctggaggaggtgcttgttaaagatgcaagccccttagtaccactccagatctgttgaaagaaagtatctggggatacagcctaggaaatctgcattttaacataattccttggatttttatttaagattgtgtttgaaaaatgtcaagatagaggcaagcaagaggatcacctaggagagtaaattagtaaaagatggcagtattagcaatctctttagtttgactacattcattccaaatttaagagtgagtcctaagttaggcttgtttccttgaactatgtgaggagaaaaagctttaactagcaaaagaacgtattaaacaagatttggagaaaaattccttttccaccttaaaaaaacccaatgtacaactctggattactcttagcttccttatttcaaatactttccagtttatgtacttgaaataaatacaacaacttctagaacagcttgcagttcagatctggcttttactaattgtaatcaaacataattctggaggaggaaagaaagaaaggggcaatgaaggaatgggagagaagaaagagtaatgcaggaatacattctaacggttccccttcaaggggcagcatggcagagggggctggggtggaaagtgggttgcaaaatctacgaagagttgcgatagggaagaaaccaggttgaggaagcagccagaatgtcaccctccttcctaaacatgtttttttctcctatgcagggccaccatctgtgcaagtagccaaaaccactccttttaacacgagggagcctgtgatgctggcctgctatgtgtggggcttctatccagcagaagtgactatcacgtggaggaagaacgggaagcttgtcatgcctcacagcagtgcgcacaagactgcccagcccaatggagactggacataccagaccctctcccatttagccttaaccccctcttacggggacacttacacctgtgtggtagagcacattggggctcctgagcccatccttcgggactggagtaagtgtatggcagatggatggaattagggtcaaagcagagaaaatgagatgtggatcgatacatggtacatggtagacagcgaagtgctgaaaatggggactgagtctggaggaacttacggggggcttaggaccagaatggggaaatgggataaagaaatggaaatatttaggttggtgcaaaagtaattgcagtttttgccattactttcagtggcaaaaaccgcaattacttttgcaccagtttaatatttagtctgtgctattgctgctctggtggtgtggttgatgttgctgcgtctatgtttgagggtgagaggggagcgtgcttgctttgaaatgaggatgtaaatttggcaatcatattttcagaaccccaaattgtaatacactattctagcctccttagatttcaactattctggtgccagaagcagatgggagctgaaggaatgatgaaggttgaagaaggggggcttttcttggtgtggggcagtactgcatttggcctgctctaccaagcatacgggagtagtaaagccacggctggcagaccatttggcatgcatgctcaggggccagtggataaagaattacttacagttcaaacactgtttgaactcagtgtcgggagtagttaaaggtatcgtgagaagttgcacacagctttggggactcttggaaaagaaagaggaagaaatgaggaagaggaagggtgtctacaaagggccagagaacaggatctcagatcagctgctgtaaccaggtttccccttgtgggaagtgttgtttcttgctgggcagttgggaagggaatggagaacagagaagagagtggaaatcacatgctcacttgaactttcctggggaacgtctcctcacagcgtgcacaagagcctccctttagaaatggagtgttcattttatcatgggaaaagaatctgagtgggacatgattcagaacaggaccggcccaaggaagtgcaggggctgtggagtgggatggagacaagctctgaaaggacacatgggagatctagatgtagaaggtacacaagtagtaggataactcacaggatggatccactggaggttaagacatgtggtaagacagtgtaataggaagctgctcagttggagaaagtaaggaagcaaacattgttaccgtgggggcaatggagaggacagtgaggagccctttatcctgataagggtggctttgaggtaaaggaaggaaagaggatgccttgagaggccccactgtattagagaggacctggaagccaggatgctaattctggggagatggattccccaggcttactctaggagtagaggtccatgggacgagggtttgatttgagaaagatcattttcttgggagtgggtggtgtgagctagacccttggagctgggataaaggaccttttaacccactgagaggtggctgcaataaatggaattgccctgggggtgagcaacagaaactgggtcaagtaagtttctattttttgcagcacctgggctgtcccccatgcagaccctgaaggtttctgtgtctgcagtgactctgggcctgggcctcatcatcttctctcttggtgtgatcagctggcggagagctggccactctagtgagtgactcgctgaactcccatccccactcttggtcccactctctgcttactttctgtttgtgattaactctctccttcctactgcatttgctatgaatactgctagatattttcatccacaaagactggtataatcaagtatcttcctctcttaggttacactcctcttcctgggtccaattattcagaaggtaacatctctgttggtctgtttccctacttgccctttggtaggggtgcgggttagaggggtcagtgttgggttcaactaatcttgattattatatgggtgagcttccatgaggatctaggcaagggcatgatttaagctgccattgctaggattaagagcaggaaggagcatcctcctcttctaccaagtgggatgtctgtggagaggaggctgaaggtgcttcctttgtattagttgttggtgccctggagttttcagtatcactgtattaaggcatgggatggttacagtgacaaacgatgggggcaagttgggttgaagcctcattatctcccttttatttattctgtaggatggcacatttcctagaggcagaatcctacaacttccactccaagtgagaaggagattcaaactcaatgatgctaccatgcctctccaacatcttcaaccccctgacattatcttggatcctatggtttctccatccaattctttgaatttcccagtctcccctatgtaaaacttagcaacttgggggacctcattcctgggactatgctgtaaccaaattattgtccaaggctatatttctgggatgaatataatctgaggaagggagttaaagaccctcctggggctctcagtgtgccatagaggacagcaactggtgattgtttcagagaaataaactttggtggaaatattgtttttccatgtcttcttcctggggccctggggaaggaatatgggcaaagcagggactgaggttaattctcttctgcttgagtaggggagaaatcaatgccttcttccattttcccacttagacatgacagaatttggggccgttttctgatttataattcataaggagaaattcaactgtggtgggttggagtcacagagtatgggcaaggaagggaattaacagcttactcacctcatacaggatcttatgaggattaaatgagttcatacttgtaaatggctaagaacaccgccaggcacatagccagcctgcaatagtgacgttagctatattcgattattcaactttctggccaggcattgtaccaggtgctttgatcctcatcacaaccgtaaggcagacccctcatacccctcaggattcaggggacagagcttaactccagattgagttctagacagttatttcttccataccctgaatgcagaagggaacatagcttgagtgattattatgtcttaggcactggtctcagacctttatatttgtagctcattctcttctcacaataaccacacaagggacagattgtttccctctatgttacagacaaaagatgtgaggctcagagacatttaagtgacttgtccaaggtcaaagaacagatttctgtaggatgtttgtctacctgagctggaagtagcagattactttattctgaagaccctcatgctggtgagcacacatctcttcagagccaccgttccattcccttctaccccaagaccaaggagagccctttgggggaatggactccaccctaaggaagagaggatgctggctggtggtttgttgtcccacgaagggcgacacctgctggacacagaaacctagggtgtggaattgtttttggaattagagctagatactagaatatgggtaagaaaaagaaaccaagaaatgagttgatttggaacacctccataatttcttcagaagcatccttggaattagagcatctcttctggaaggggttaacagaagaagtcagtggaaggaacttaatctctacattttaccatttttatgtttcattttcattttttctattcactgtttttgtttttatttttgtttgtttgacaaagcaaattccttttgaaattctagtttagtctaggaatggggggctttgggccttgtctatatctgggcagttttatttattatttttattttatttatttattttttttcgagacagagttttgctcttgttgcccaggctggagtgcaatggcgtgatctcggcttattgcaacttctgcctcccatgttcaagcgattctcctgcctcagcctcccaagtagctgagattacaggcgtgcaccaccatgcctggctaattttgtattttcttagtagggatggggtttcaccatgttggtcaggctggtctcgatctcctgacctcaagtgatccacctgcctcagcctcccaaagtgctgggattacaggcgtgagccaccgcactaggcctatctggacagttttaaaggagaagctgcagatctgaagggtctagttctagtcacagcagtgggaatcaaagtggcaggatcccagagaaaggaagtagagagttagctaatgggacggcttccagttccttttctagagatttccagtgcaggcttttctctgccctaactttgtaggttttttgttttataggaaaggctgtccccttccaggtaaggaatagggaaaagtatatgtaggtctgctaggatccagaaagtcagaatactataggtagaaaggggagttcttacacaggggaatgagtggtacttgaaaggaaggtggaagaagggtgatggtgcaccaattgtaggaggatgaggagaagagaatggatgctgcatgaggagaatggaatgtaaacataatggattgccaaaaaaggagtgcgtgtgtgtgtgtgtgtgtgtgtgcacttgagcacatgtgagagaaagagaggaaaaaaagagaaggagtggaagagagtaagagagagggagcaaaagggtgagaggagagaagtggagtgggagaaagaaggagagggacatagagagagggagggaggggagcgggggaagagagagagagctggactttcgggttatacataatccaagctgcacaaagaattgttttcgcccttcaatgtcttgttgttttaaaagctgaacttggagctagaattggttttaaaggtcatctagtccacctcccctcccatgaaagaactgggcctgtgttaacaagggcacacacagtgcagggagttccttcaacacttggggcagataacaatattttagagaaacgcgttgaccccacatttgagcttcttcttttgaccattaaagacaatgagaataaatctcaaatacaccacgggaggtggtatccttggcattttttttttccctgagggagagcatgttcctaggttccaggttctctttgcctccctacccacgaacacatgcatgtgaaagaaacagacaagattgacatttaatcccaatgtctatttatgaaaattatctttaggccattttctcaagtttttctctttccaaagtaaaattgggcaaatcagatgaaaaacgagggtggagttcaaccccatcctcaaatccttttttttttttggcttgagtgtctgtcattcccaagagccctccaactgccttgaagcaaggcatgggggatttctccgtggtgcttcctgccactacttggccagaccagtctccaggggtttcagagagtggagaggccccaaacctatagagactactcccagatggggggctccttgtttctccagacccttcctcttccatttcatatgaggcttccaagaggcccctggccgtgctggtctggggcagggaataaagaaatggcttttattgtatcagagtctcaacagaaaacagatggcatactcgaaataggacatttcaaggaaagtttatttattagcaaagtatttacaaagaactgggtggaggatagctgttactaccccaaggtccaaagaggccggggacagaaggggttatcaggactcagaaggacagcaagccctgtacagtcaccaccttgccaagggcagtgcccttcagtcaagggacacaacagcttaaggtgaccttgtagggaggaagccaagggattagaaacactgacctcactcccctcttccctctgctcttaggctgatgctggaagcaagaagaagccagggagcatgggagccattcaatgtcatgcaggtcagcacctgaggcagaccccaggtgcagaagtattgagagtgggtccagaaggacagatggaggacaggaagtacattcacaacaagaaggaaaaacgtcaatgttgtggggtggagagagaggtgcaaaatctgggcttcttttggccttggacaatgacaagcgcatagtagcaacagaaactaagtttgtagtttcctactggggagtttgggaggacactcacttctagttctgtcttccccacttgaattttgattgtggttatactgaatttatagaaatttggggttaactgacttgtttttattactaaatcataccatgcaaaaacaggatgttttctcatttattgaaatcattttgtttgctctttattatggtttttaaactttactttttcatagtagtcctgagtatgctcagttaattcttaggcatgttgtagcttttgctgctattgtgattggtatcttattgcaattctacttttgaatcagtaatttctgatgtagaagaatgtatctaatttaaaaaattgtggttaaaaaaataacatttaccgtcttaaccactttgaagtgtacagctcagcagtgttaagtatattcacatttttgtgcaaccaatctccagaactccttttcaccttgcaaaaccagaactctacacccattaaacaacaactcctcatttctctcttcctctagcccctggctactatcactctacattctgtttctatgaatctgactacttcagataccctgtacaagtgcaatcatggagtttttgtcttttggcgattggcttatttcacttagcttaatgtccttaaaattcatacttgttgcagcatgtaagagtgctttcttcctttttaggctgaataataagctactgtatgtatatgccatattttgtttgcccattcatctgtctatggtcatctttgttgcttccacctcttggctatcgagaatagtgctgctatgaatatgggggaaaatatctgcttaagtccctgctttcaattcttttgcatttatacccagaagtggactcttgggtcatatagtagttttactactgattttttgaggaactgccgtactgtttcccatagcagttacacattttacaatcccacgaacattgcatataaaggttctaatgtctctacatcctcaccaacacttatttcttccctccctctctcccttccttccttccttccttctttcctttcctccttcatttgctccctccttcattccctcccttctttcctttttcctttcatttttatagtagccatgctaatgagaattagatgatgctatggttttaatttgcacttctctaataataagtaatgctgagcatcttttcatatgtgtgtttgccacttgtatatcattctcgaggaaaaattgtctgtttgaaagttttgtttgccccctttttaactgtttgtataaacaattattgttgggttttatgagttctttacatattctgaatattaaccctttattggatatatgatattcaaatactgatatatgattttcaaatattagaaattaataatttttgtaagttgatcttatatgggacaaccttgctcgatcctcttattggttttagtggggtttttgttgttgttgttgtcattgttgttattgatattctctctgtctctctctttttccaggtagataatagtatcatctgcgagcattgttttgtgttttccctcttaatccttagtgttttatttttcatgttgcttgactaggatcttcaatgctgtgtcaaacagtagggtgataatgagcattactcttaaaggaaataaacctaaatattctcattaagtataattttgctgtatattgtagattcacatgcagtggtaagaaataataaaaacaatcctgtgtatcctttacccagtttcccttgatggtaacattttgcaaaactatggtacaatatcacaattaggatacatggatacagccacaatacagaacacttctatgatcacaaggattcttcaccttgcccttttctagacacacccacttccctaccatcccataccctccttaatgtctagcaatcactaatctcttatccatttctatgactttgtcacttcaagacaaatttttttttgtcattttaaaacaaatgattaataaatggaaacatatagtatatacacttttgggattgacttttttttctctcaatgtatttctctggagatcatacaaggttgttgcatatatcaataatttattattgcctagttgtattatatggtatgggtatagcacagttagtttagccatctgtccatcacatctgggttgtttccagatttggctgatatgaatataagtttttgtgtggacataagtcttaatgtctctggagcaaatgcccaggagtgtacctgctgaattgtatggtggttgcatttttagttttttaaataaactgtcaaagtgttttccagagtggttgcaccagcaatgtgcgagtgattgttttactgcatcctcacaggcatttggtattgtcactattttttttattttttttgagatggagtcttgcactgttgcccaggctggagtgcagtggtgcgatcttggctcactgcaagctccacctcccgggttcgcgccattctcctgcctcagcctcccaagtagctgggactataggcgcccgccaccacgcccggctaattttttgtatttttagtagagatggggtttcaccatgttagccaggatggtctcaatctcctgtcctcatgatccgcctgcctcagcctcccaaagttctgggattacaggcatgagccactgcgcctggcttattgtcactattttttatttcagccattctaatatgtgtgtagtgagatcttattgtggttttaatttgcgtttccttaatggctaatgatatcgaacatcttttcatgtgcttatttgccatctgtatatccttttaatgaaatgtctcttcatgaatttttcccattttctaattaatttttttcaaactgttgattttttttctttttttttctgagatggagtcttactctgtcactcaggctagagtgcagtggcatgacctcggctcaccccaacctctacctcctgggattacaggcgtgtgccacaacgcccagctaatttttagtatttttagtagagacagagtttcaccatgttggctaggctggtctcaaactcctgacctcaagtcatccactcgcctcagcctcccaaagtgctgggattacaggcatgagccagggggcctggcctgagttttgataagttgttatatattctagatactagtccttttttggatacatgatttgcaaatattttcttccattatgtagcttgccttttcattcctttacaagtctttcacagagcaacagtttttagttttaatcaggtctaatatatccattttttcattttacagatcatgtttttggtgtcaaatctaagaacttgttgcccagatctagattcagaagattttcccctatcttattctaaaagttttatagttttacattttgcatagaagtttgtaatccatattgagtcaatttttgcagaaggtatgagtcttagattaaactgctgctcctccttctcttcctccttgttgtctttctctcctcctatggcccttgaatgttcaattgttccagcaccatttatgtttttccgatgtctgcagggtgtgtagggatattccctgtggacatttctatattctttctttcttctttgtcagtgtagtctgctagaggttcatcagttgactgatcttttcaaagaagcaactttttgtgtctcactctgtggcccaggctggagtgcagtggtgcaatctcacctcactacaacctccgcctcctgggctcaagtgattctcctgcctcaaccttccaggtagctgggactacaagcgcctgccaccacatttggctaattttttgtaattttagtagaagcagagattcaccatgttgggcaggctggtctctaactcctgagctcaagtgatccacctgccttggcctcccaaactattgggattacaggcgtgagccacagtgctcggccttcctttcttctttggatgtattttgatcttctttttctgggctcttgagatgagagtttgaattattaatttgtgtacttttttttttttttaaagagacaaggtctccttatgttgcccaggctggcctcgaactactgggctcaagtgatcctttcctgcctcagcctcccaagtagcacccagtttttcttctttttaatgtatgcatttaatgctataaatttccctttcagcactggtttagctgtgtcctataattttttttattattttgaaaatatttcgtgggttcatggtaggtgtatatgtttatggggtacatgagatgttttgatacacgcctggaatgtgaaataaccaaatcatggagaatggggtagccattccctcaagcatttatcctttgagttacaaacaattcaattacattctttaagtaacttaaaaatatacaattaagttatttttgactatagtcactctattgtgctatcaaatagtaggtcatattcattctttctactttttttgtacccattaaccatccccacctccccgctcagctatccactacttttctcaggctctggtaaccatccttctactcactatgtccattagttcaattgttttgatttttagatcccacaaataaatgagaacatgtcatgtttgtctttctgtacctggcttatttcacttaacataatgatctccagttccatctatgttgttgcaaataactggatatcattcttttttctagctaaatagtactccattgtatgtatgtaccacattttctttatccattcatctgtcgatagacacttaggttgctccgaagtcttagctattgtaaacaatgctgcaattaacataggagtgcagatatctctttgaaatactaattttctttctttcgggtatattcccagcagtgggattgctggatcatatggtagctcaattttaatttttttggaggaacttccaagctgttctccatggtggttgtactaatttatattcctgccaacagtgtacaaagccttctccacatactcaccagtacttgttattgcctgtcttttggatacaagccatttttttttgagatggagtcttactcagttgcccaggctggagtgcagtggcccaatctctgctcactgcaacctccatctcccaggttcaagcgattcttctgcctcagcctcccaagtagttgggactacaggcatggcccaccatgcccagctaatttttgtatttttagtagagacagggtttcaccatattggccaggctggtcttgaactcctgacctcaggtgatctgcccgcctcggcctccctcagtgctgggattacaggtgtgagccaccgtgtccagcctgcatacaagctattttaactgaagtgagataatatctcattgaacttctgatttgcatttctctgatgattcataatgttgagcacctttcataagcctgattgccatttgtatgtcttcttttgagaaatgtctattcagatcagctcattttttgtttggactattgaactcttttttcctatagagttgtctgaactccttatatattctagttattaatcctttgttagaggggtagtttgcaaatatcttctctcattctgtgggttgtctctcctagaaatttttgatatgttgtattcttattttctttcaattcagtgtatttttaaatttcctttgagatttattttttgactcgtagagtatttaaaagttttcgcttagtttcttgactttcctctgtcatctttctgttatttatttctagtttgattccaatgtagtcagagaacacattctgtataatttatattcttttaaatttatcaatatttgttttatggccctggatatagtccaacttggtatatgttgcatggacacttcaaaagaatgtatattctgtgcggccaacaagcatgtgaaaaaaatgctcagtataactaatcattagggaaatgcaaatcaaaacaatgatgagacaccatctcaccccagtcagaatggctattgttaaaaagtcaaaaacaacaggtgctaacaaggttgtggagaaaaaggaacacttgtacactattgggggtaatgtaaattagttcaggcactgtggaaagcagtctggagatttcccaaagaagcttaaagcaaaattcccatacaacccagcaattccattgttgggtatatacctaaaagaatataaattgttctgtcataaagacacatgcacatgcatgttcatcacactgctattcacgttagcaaagacatggaatgaacctagatttctttatccagtgctcatcaacagtgcactggataaagaagatgtggtacatatacaccatgaaatactacacagctataaaaaatgggatcatggcctttgcagcaacatagatggaactggaggccataatcctaaacaaattaccgcaggagcaaaaaaccagctaattgcatacacatggacacaaatagggaaaaatagacactggggcctattgagggtggagggtgggaggacagtgatgattgaaaaagcacctatcgggtattatgctgatgatttttcctctgctgtctttccgttattgatttctaatttgattccattgtagtcagagaaaagtttgtataatttaaattcctttaaaattatctgtacaccaaacccttgtgacacgcaatttacccatgtaacaaacctgcatatgtaccccttgcacctagtaaaaccggaaaagaaaaacaacaaaaaagagccaatgtgtattctgctattgatgggtggagtgtcctgtaaatgtggatttgatcctgttggttgatggtgttattgagctcttctacatctttgctgattttctttctagtttttatttttttatttttattttttttgagacagagtcttgctctgtcccccaggctgctggagtgcagtggcaggatctcagctcactgaaagctccgtccccaggttcacgccattctcctgcctcagcctcccgagtatctgggactacaggcgcccgccaccacgcccagctaattttttgtatttttagtagagtcggggtttcaccgtgttagccaggatggtctcgatctcctgacctcgtgatccaccccctcggcctcccaaagtgctgggattacaggcctgagccaccactccctgccttctttctagttttattaatagttgtgagagttgtgttgatgtctccaattataattgtggattttctattttttctttcagttccgtcagtttttgcttcacatattttacagctctggtgttttgggcataaacatttctgactgcaatgtcttcttgatagactgacccttctattattataaaacgtccttatctttctctggtaattttttttgttttggctctgaagtttaccttatctgagagtagtacactcactcctgtattcctctaattaaggaaaacatgttgtgtctttttccatccttttacttttaacctgcctatgttgttatatttgtgtggttttattgttgtttttgtttgttttgtgttttttttgagacaaagtctcatcttgtcacctaggctggagtgcagcggcacaatctctgctcacggcaacctctgtcttccagggtcaagcgattctcctgcctcagcctcctgagtagctgggaccacaggtgcacaccaccatgcctggctaatttttgtattttagtagagacggggtttcaccatgtaggccaggctggtctcgaactcctgacctacctcaaattatccacctggcttagcctcccaaagtgctgagagccactgagcctggcctatattgttatatttgaactgggtttttttttgtttttgtttttgttttttgtttgtttgtttttttttgtagagtgctgggtttacaggtgtaagccaccatgcctggcctgaactgggtttcttaattgaggtatttagatcatttgcatttagtgtaattttttttcttaatttttatgtttaattattatgggtacacaaccgttgtatatattagtgaggtacatgtgatgttagttacaggcatacaatgtgcaatgaccaaatcagagtaattggggcatctaccacctcaagaatttatcatttctttgtattaggaataatgtaattattgatatatgtattagcttggggtgccataacaaaataaaactaggtggcttaaacaacagaaatatattctctcacagttctggaggttggaagtctgagatcaaggcgccagcatggtcagcttctggtaagggctcttcctggcttatagagagagttgccatcttctgggggcagagtgagagagaaagagagaggaaggctgggagggagaaagagcaagagagcataccctggtttctcttcctattgaattaatcctattgaatcatggccctacccttatgaattcatttaacctgaattacttctgtaaaaggccctatctccaaatatagtcccattggtggttagggcttcaacatgggattctgtgggacacaatccaacctgtagtaacatgaagggcttaattgtttttcatttattttgtttgttctctccagttttcatctctgtttactcttttctgactttctgtggcttacttgggcattttttagaacgccagttttatttatctacagtgtttttgagtgtattgatgcataacttttaagtggttgctttaagtattacatatacatgtaacttgtcacagtctgctggagtcatcatttaccattttgagtaaataataaaaatcttaccttcctaatttatgtcccatccctttatcctcctcactgaaaatacgattgtcttaaatgtttcctctacatacatttagaaccacatcagtgttataattttggcttcaaccatcaaacatactttagaaaacttaagaggagaagaaaaatttattgtatttacccatctatttgcttaccttgttctatcttcttccttgatgttccaaggttcctattttatcatttccattctgtttagataacttcttttagccattttcattatttctgggcaggtgttctccccccgcccccatctccattgacatcttagagagggggccccattactggcttgcagaaatgaaattcttagcttcctaattggtcttcttggataccactgcagagtgatgttggagcaccttgttacagcttcaagagggtgaaagtttaggtctcccacttggtctttctggtgtgaatggcagtagagtcacagttattgctatggtatttgcctagaactgaacagttactttctaaggcttgacaggcttgcctgcctctgtcttggtcttttggctagtgatatcagggcttttgttgtaagtgttgttggggctttttctgtttgtttgtttgtttgtgccagttggtctttccaaattgtcactttcttcagctccaagcccagcatatatgtggcaaaaagaaagcccagggaactcactagtatgtcattcctcagatcctgagattctagctgttctgccttctcatttccaccttttagagtcttcttatgtttgttttatatatatataatgtccagagtttttagttgtacttagtgagatgaataggaaaaagtatgtctactcaatttttccagaagtctttgctgtcaacctttactaaattagtaggtttccttttattcctggttttctaaaagtttattttttaaacataaatggttttttacatttaaaaaatagtttatcagaattgactcatttcattgtattttccttcttaatctcctaatatagtgaattatattgagagatttttaaaatgtgaaacatctttgcattcctgggataaacgctatttgttcatcctatagttacacatttactgttggtgttatttagttaatattttacttgggttgttgtatttacttttataaagcatggacgtaaaacttgcctttcttgtatttccttgtttgtttttgtaataaaaatttctctaaacaataacctaggcagattttgttcttcattctgtttcctggaataataaatagaaatgtcttttcaaagggcagcttttgtttttgttcatctattttattgtttttatctctctttttcttttatgactatctttactatttccttcctcctttgggtgtattctgttcctctttacctagcgtttgagttgaacactcagcttattgattttggtctttttttgtgtttcctagtaagtgtatttaaaggtaaaaaatttccttctaagttctgctttaatcatatctaacacattttgatatgcagtgttttaatttttatttaattctacatattctttatatttttcttttaactcacaggttacttgtgacatttaaaaactttttattttgaagtaattttagaagagtagtacaaagaattcttacgtacacttgtccaaattcaatgatttgcaacattttgtcatatttgctttctttttctctctgtctctgcttccctctctgtttttttcctaaaaaacattaatattcctaagtccatttagggacttactctaaatggttatgaaaaaacattagagagaaaaaatggtttactctaaaatggttaggaagtctggagttacatacacacatgcccctttcctgctaaatatttcaatgtatttcctaagaacaaggctgttctcttacataaacacagaaaaacagtcatattaagaaaatttaacttggatataatattagctaatccacagtacatattcaaattttaccagttttcccaataaagaaccttataactccagccactcccagtctcttgtcctgcaatccagaatcaagcatttcagtaagttttcatgtctctttggtcatttttaatgtgagagagtctatcagtttcttatttattcaggttttattaattagcttgaacttatataattttattattttgcccttcaagaactctgctttttttttttttttctttttggtctagtttatctaccagtttttgagagagggtttgtaaaaatcatcaaatgtatttttaaaaaactcaacttctaactgtagttctttcacttgttgctttataaattgtgaggctgtattgttgagtttatatatatttatgattactatatcttcttgtttctttaaaagttatatgaacatcttttcttttgtcctttatgcactttattttttttatttttatttttttttgagatggagtttcgttcttattgcccaggctggagtgcagtggcacagtcttggctcactgcaacctccatctcccaggttcaagcgattcttctgcctcagcctcccgagtagctgggattacaggtgcgtgccaccatgaccggctaatctttttgtatttttagtagagatggcgtttcaccatgttagccaggctgatctcgaactcctgacctcaggtaatccgtcctcctcagcctcccgaaatgctgggattacaggcatgaaccactgcacctggcccaaaatagaatttaaggttaaaaataaagtgcaggctggacgtcgtggctcacgcttgtaatcttagcactttgggaggctgaggcaggtggatcacctgaggtcaggagttcaagaccagcctaaccaacatgatgaaaccccaactctactaaaaatacaaaagtagccgagcatggtggcacatgcctgtaatcccagctactcgggaggctgagtagggagaatcggttgaatccaggaggcagaggctgcagtgtaccgggatcgcaccattgcactccagcctgggcaacaagagtgaaactctgtctcaaaaataaataaataaataaataaataaataaataaataaagtgcataggccgggcacggtagctcatgcctgtaatcctagcactttgggaggctgaggcgggtatatcacctgaggtcagaagttcaagaccagcctggctagcatggtgaaaccctgtttctactaaaaatacaaaaaattagctgggcatggtggcacacctgtaatcccagctactcgggaggctgagacaggcgaatcacttgaacccaggaggcagaggttgcagtgagccgagattgtgccattgcactccagcctgggagacagaggaagactctgtccccctcccaaaaaaaaatcaattctattttgttacatattgagactgttgcccaactttcttttgtgtcatatttgccaccaggtaaatcttttttccctgtttttaaatttcaatctttacatatctttctgctttaagaggatttgccatatgcattcatattaaaaactttcaataaactaggtattgaaggaatatacctcaaaaataataagagccatatatgacaaacccacagccaacatcttgctgaatgagcaaaaggtggaagcattccccttaaaaaccagcacaagacaaggatgccctctctcaccactcctactcaacatagcgttggaagtcctggctggggcaattgggcaaaagaaacaaataaagacgtccaaataggaagagagaaagataaactatccctgtttgtagatgacatgatcctatatctagaaaaccccattgtctcagcccaaaagcttcttaagctgataaacaacttcagcaaaatatcagaatacaaaatgaatgtgcaaaaattactagtattcctatacaccaaacaacagtcaagctgagagccaaatcaggaatgaactcccgttcacaattgtcacaaaaaaaataaaatacctaggaatatagctaactggggaggtgaaagatatctacaaggagaactacaaaccaccgttcaaagaaatcagagatgacacaaacaaatggaaaaacatctcatgctcatggataagaggaatcaatatcattaaaatggccatactgcccaaaacaatttatagattcaatactcttcttattaaactaccattgagatacttcacagagctagaaaaactattattattattattatttttttgagacggagtttttgctcttgttgcccaggctagtgtgcaatggtgcgatctcggcttaccacaacctctgtctcccaggttcaagcgattctcctgcctcagtctcccgagtagctgggatattacaggcatgcgccaccatgcccagctaattttgtatttttagtagagacatggtttcgccatgttggccaggctggtctcaaactcctggcctcaagtgattccccctgcctcggcctcccaaagtggtgggattacaggcctgaggcaccgtgcccggccagagctagaaaaactatttaaaaatgcatgtgaaacaaaaaagggccagaatagccaaggcaatctgaagcaaaaagaacaacgttagcagtatcacactacccaacttcaaactatacagggctatagtaaccaaaacaacatggcactggtacaagaacagacacatagaccaatggaacagaataaagaacacagaaataaaactacacctatgactgtctgatcttcaacaaatctgacaaaaacaagcaatggggaaagtattttctattcaataaatggtgctgggaaaactgggtagccatatgcagaagattgaaactgcatcccttccttacaccatccaccttaactcaagatggattaaagacttaaatataaaactcaaaattataaaaatcctggaagacaacctaggcaataccattcaggatatactggcaaagatttcatgacaaagatgccaaaaacaattgcaacaaaagcaaaactgaccaacaggatctagttaaactaaagagcttctgcactaaaaaggaaactatcaacagagtggacagacaacctacagaatgggagaaaattttgcaaactatgcatccaacaaaggtataatatccagcatctataaggaccttaaataaatttacaagaaaaaaaaaccattaaaaagtgggcaaaggacatgaacacttttcagaagaagacatacatgcagccaacacgtatatgaaaaaaagctcaacatcactgatcattagagaaatgaaagtcaaaaccacaatgagataccatctcacatcagtcagaatggctactattacaaagtcaaaaaataacagatgctggctaggttatggagaaaaatgaacgtttttacaccgttggtgggagtgtaaattagttcaaccattgtggaagacagtgtggcaattcctcaaagacccaaagacagaaataccatttgacccagcaatcccattactgggaacatacacaaaggaatataaatcattctattataaagacacatgaacacatatgttcactgtagcactattcacaatatcaaagacttggaatcaacctaaatgcccactaatgatagactggataaagaaaacgtgatacacatacaccatggaatactatgcagatataaataagaatgagatcatgtcctctgcagggacatggatggagctggaggccattatccttggcaaaataatgtaggaagagaaaatcaaatgccagatgttttgacttataagtgggaggtaaattgtgaaaacacatggacacacagaggggaactgcacacatgggcctattggagggtggaggtgggaggagggagaggttcaggaaaaataactaatgtatactaggcttaatacctgggtaatgaaataatctgtacaacaaacctccctgacacaagtttacctatgaaacaaacctgcacatttacccctgaacttaaaagttaaaaaagagtatttgttataaatcacacatgatttggttccctttttcctccattattagagcctttgttcttttattggtaactgctgaagtaaagatttacttttgcaactcatttcacattctgtttttattgtacaatgtttcttcccttttcttgctttccatttgatagactgatttttttctgctgtattaaaagttatacatactgattctgttcttatggtggttgcctttaatttaacacagtgagcatttaccttttaaaatgtcttaactaccttaatatttatatcttgcctcctaagttctttagcatactcttatgttcttttgattttctacttccctccctctaatgccaattctcctaccaagtagatattacacacacacacattcatttaccctcttttaaaaatatggtcctggatttgttgacaaatcacccttatatttgttgttgtaaatttcttgatttgattctctttttgtgtacttcctctaagagtgtttttttttttttttttttccacgtccaagagtgttttaaatatgagcctttggattctttgcatgataataaatttgttatgccatctcacttgaatagcaattttgatacatataaagttctaaactccagtttattttccttcactactataaaaatattattttattttattcttgcattcattgctgttgaaaagtctgacatcaatctgatcttactcctttgtaaactgttcttttttttttttttttttctgatagggtatcactctgtcacccactggaacctccacctcccgggtttgcctcagcctcccgagtagctgggactacaggcacacgccaccaggcggggctaatttttgtatttttagtagacacagggtttcaccatattggccaggctggtctcgaactcctgtccgcaagtgatccacccgcctctacctcccaaagtcccaaagtgctgggattataggcgtgagccactgtgcccagttgataaactcttctttctaagttttaaaaatatttatttgtctcaatataacgagcataggtgtggatttttctgaagctcctgttaagtatcctttgaacccttttctctgaggtctttcataattaaaaaaaaattgtaaatttattagtcattattttctcacgtatatatttttttcctctcactgtgagttctcttatgattcagatgttgatacttctatttctagcatacattttgctgaactttcttttatatttttgatgtctttattctttcctactgtcttctgggattatctttcatcttatcttttacctcacaaattattcttcagctatatttatcctggtacttgtctaatctatagtatttacaacttctactgttatagttttaacatctaatattctgtctttgtttttgtgagttactggttttgctttatgttgctggtatcttctattatcttaagtatatttgccattttgtttcaagttcttggttcatcttcttcacaattctgcattagatagtatatggtgttaatttgttgtctatgttttgcaatttttttgttccttagccatatcattatgttgatctgtgagctcacgtctccaggagggcaccagctagtctgtggggtaatgtgtaatggggaagagataaagtcaaatactggtctgtgtccctccagatccagccctggtagagagcccagaaacactgtggatctccccatttgccactactctttcaggcaactcctaggaaaagcacagttgggagtaggcaggtgctccacgttgggattcaccagcgctgggagttggggcagtggtcgtgagtagtggagaagagaatacccaaaagctcacccctagtttcatctgttccctactgatttaccttgaagatacaagtagcctggcctgttgcagcctgtttatgtatgaaggggaggcaacaattgtcccaagccgattgggaaggacatagtgcagaaattaaaaagtcttcctgcagcctgttctcccactgtggcttatctcccaggatgcagccctgcccattctctacgcacaccagctcaagacagcagttctgtctctcctggcaaatataaaaacactttatacttatttctggtgttgccagctccccagatccttgcttccttttgcttctctacctttacaaaaattaattttgggtgagggagctggaagcctgaacctacctatttgccatttcacaggaactggaagctttatttctggtcctcaaagggcaaagtgacaagcgacattcaatagctcatggcctgaggcttcctgatgcccagggtcttacactcgtagccaggactgatgtgttgtcatagccattccaagggtctcttttcaaggtgtccaatggggtggcaagcagggattctgattcatctatgctccagggacaggagagaaaggaacttggagattcatgaggtaggcatgaagcttggatagtgggaggggaggaagatagatgtgtgttgagcatttattgtgcactctattgagcccttgctgggtacaccttgagggctaatttacttcacagaatccaggaggaatgccttcaggggtactttcaggaaagtatccatagatttttaggaggctgtgtggtgaagctatgttcatactactagataatatttaccttataggcttcatgatgtataaatctgcctttcctctaatttataatagaagcatccatatgatttatgaattctttcagattagctcttttaggccatcctagctaaatactgagggtgtttagtatcctcagggtgctttgctgcagctgtccccagctggtctcgttttttcctattttctaattggtctctacccccattcctccctcagtctgtcttgacagatggcagatgcatcttcctatgtggcagtgcttggcactaggtttgcagcaaatgcttgttggattgattttctttagatttgaaggttaaaaagagagtttttctctttataggcacccatcccaatttcttctccttgcaatgctcagtagttgctaccaggaagggctgtcaccaggttgtgtcctaactggaatgagctcttgagtgggagtaagcaatgtttgttggtaggtcaaagggttaacaacagttttaagctcttttttcccatgggaagatgaactccagtttaccttatacttactgtttctttgaaatgtactgtttggataaatgtgaaatgtcagctgtattttaaaaaatcacatttatttatttatttatttatttataagtgtggaaatgacccctggttggtgaactacatctatgctgggcagactgcgggcaggcatttagacttggtggacctatatgaccagacccgtatgaaaacctgttgggaaatgtaggccctggactctgttatggtgtgtttcttgaatccgaatatgcctgttttcttggaatcctcactcatgggttggtataagatgtggttcctgtcatgtgagagattcttccatcctagaatggctcccccgtgcctctcccctactcctgtggtcttgtctactatgaccatgcatattcccatgagatgagagggttaagaatcagcatctagaatacataaagactcctgatgaagatgtctaatgctgtcaggctgacaagctatgtttccatatccaatattcctctacaaagctaaataaataagttgccgtataacagcccaccaagtcttttgagtgtgtatgttaatctgaacccaaggcacaactaatttgtatgaagtaagcattgtaggattttttttcctacaaaaataactttctcttcattgctgaaattctgttgtaaataaacaagtggtaagcagaggatcataaaatgttccttgctcaaagccttaaaattcccaaaactccagcattcaaatttctctggacagaattggaaccaaaatgaagtcacagttaataataaaacattacatttgtgtaatgctttgaatattctaaagattttattctacttttcctgtcttctcttctctgactgactcaatatggcttctcttgtacctgcaaaaagatgacttcaaaatccatttctccaattttgaacccactacagtacttgatatccatgtatgccactatttagaagcaaaggaaataaaatcattgaaatgacactttgaaatagacttggtaggacctgaaaactcactgaatccaatcttctcactcagacagttgagtggacagtggtttaatccactgaaagaggaaatacaagggaaggacatgtttgagaggtgtttagagaatgattgataaaaggtcttagaagaggtgagtgtccactatttttgcactggagtatctacccctgctccaaggtccctcatgttcacatctgttggggatgatgggagggccagaagacagcccacctcatggaaataagagtagccaggctacatggagtaggtcgggaagcaaggaggctcaggaccaaggaaaggtttatcgaataaatattatgaaatgctcagctggtatatgaagagcagtgagggttgggggtatcaggatcacaatccatattcagttccaagatgtctggaccatttcacagttgggatatggtcttcctctaaggaagaacatgggctgtttttttcatacttctgatcacagttggcaagaaggaatggttggagtaatagactagtagttgggttcttagatttgtttcttaatcaaattctcatggctaatggcaagatagaatatgcttatacaggacatttatctgaaagttgtgttacagacaacatccattagaatcatccagggtacttcatgaaaatgcagatttctgaataacctctagaactgctgaattaggatccctgggctggagcctgagaatttgcatttaagcctacttcttagcaattcttatgtacactaaaatttaagaagcatatgtaagctggttaattatgaattattcttatcaatgaaaaattataccaaatgagaattaaatgggacaactggatatttcattgctttgaagaagctggtgacaacttcatctaagacttcccagttgctctttcagtattacttctaaatttactattgcagtttatttttcattaaatcttccttctactggtacaaagaaaaatatctttgtcttcccttttaattttatttatttattttgtttgagacagagcctcactctgtttcccaggctggagtgcagtggtgtgatctcggctcactgcaacctccacctcctgggttcaagcgattctcctgcctcagcctctcgagtagctgggactacaggcgcctgccactatgcctggctaatttttgtatttttagtagagacggggtttcaccatattggccaggctggtcccaaactcctgaccttgtgatctgccagcctcggtctcccaaagtgctgggattacaggcgtgagccactgcgcccggccaattttattttttaattaaacatttctgagacattttggctttaatgaaaatgtttccaaagcatgttcaaagcgtagtccttagtttgatggtctgaagaatggaatcatttattagtggagttcaataaatatttattcgcatttatacatacaaggtcctttggacagagtaagagacacaagacaccaccactccctgaaagagcacacaaaacaattacatagataagaccaacacacacatttgaactgtggtattgaaacttaaaaaaaaaaaaagcctaaagccctctcagtaaaaaagagttgagtacttatcgacacttacatgtttatttatacattatcccatgtactagcatatggcttgactatatacaccagaactcacactgtaacaaatagaaagtttataagttaccaaaataaatagaaactttaacacttccttcctgtatcctcaaggatcatttgcacattccctgtagtgtgcacattccattttgtaaaccagtgtttttagaaaacaatgcctacctatatataaccaagcactaagttctgtgttacagattaaaaaaaccattttagagtaaagagaaataagagcaaacccagactactagaactggtaaatgaaaggaatagcattcagaaaacaatgtatattcaataaatagataaaataataggaaacatttgctttgggttcatgtcaaagcctattaagaaggagacatagacataggacaaaatgcatatgtagaggaaaaagaaacaaaatatagaaatgtaaacattacttccttctggcaaaatgtcttctagcctttggtgaggtatttccagacatttataggctacactctgccaatgattttatttaaggatgacacagtgaatgcttatttttatgtctacaaaaaaagttacaaaatttagttattcacacattcattcatcagtgcctcttgatattggaatgtttctccctattgctttatggattgactgtattcctgaaaagcttgaattatattttaaaaactcagccataagctttgtgggagacagactgtacctgtcaagttccctcttgtatctctggcacctcgcatagcatcaggctcatagtgaatattcaagaatgtcctctcgatggttgcaatatatttgaaaatctcagcattgaaaggaattctgtgacaaaccacttaaaaaagttaaaatgaatgaacattcagtaaattctgattttgatgaaacacagttgttcataagtggacaaaactatcctttaagtaaacccatggggacatttgagttgaataatttatagagacttataatctgaaagagagcgcagacatagtctcatattcttttaccacacagataaggaaaagctggagctcacagaaacttgaaagagcttgcccaaggccacatcactatttaggagcagttattttaatatgtaacaaattacgtgtgattaatctttttcagaaggggttactgcaggttttcttaaagtaacagtattagataatattttataaaacttaaaaactctataacataatgcttcataatgtttaagaattcataaacatttagtaaaaatattaaaaacatgcatagcaatgataaaactgacttcacattggtggttatatctgggggcagtgaaaagaaaatggaaggattcagaggtatcaattttattgtagtcactgatttattaaaaaaaccattgaaacaaataggacaaaatactaagatttaataaagctgggtgtttgggtaatgggggtttatttgcctttctgtgtgtttaaaatacttaacaatacaaatattaaaactaaaattagtaagagatttgtaaactaataggttttttaaaataccaagcagaggaacaaagtcaactgttatttatccaaagaaccattaacagaaataggctatatatatatatatatatatatatatatatatatgctaaagggtttagtcaacaaagtagatattctataattagcagcatgaaggagttagagtacatcttatgttgttataattaatagtaaatatttgtaacatacagaaaatacatggaacaacagtcatgcaaccactactcaaatacagttgtgctgtttgcacctgacttcaggtccacctttcttttccctcaccagatgcaattactagtttaaagttagtgcatatcatttgttattatgttgtgagaattgtccttgtgaaatatggacatttagtttattttaatggttgcacaatttattgtagaaaggcaacacaattttatttacttttttatgcactgatgggcatcccctgactttccaccaattataagcaaacctgcaatgaacatccttatgcatacttctttgtttttgtatttgagaatgtcttcaggtctctagggcatataaacatagaattgcttgtctgtaggattcttgtctctttaaatttgtacaacactgcatatgtgaaataagtagttgaaataagtgggaaaactaacccttccaccaagattctatgcaaattcccatttcttcacatttctgcttcagcacgtggtattgttaggctatctaccttgagataataaagttattctacatttcccccccaaagctttaaacctttaccttttcacatttagccttttatttcatttaaaatttatttttgtaatggtgtgaggtagagatctggtttcatttattccccatggtgatagcctatgttcctgcaatattaactgacttatccaacagttctcaaaatgtgatcagaggattcctggggatgttggaagggagagatcccttggatccttttagagggtcaacaaggtcaaaaatattcataaaattaagatgttatttgccttttttttactctcactctcataagtgtacagaagggttcgccaaagacaacaatggcatgtgatgaatagtgatgactatttctctgatacctaacagattgtgtgcctgtgtattgtattttctagagttttcaaaggtagtgagtttacggtataagtatgtagttttcagaaattatttcttttctaccatgctcttaccagctatcttcagttatacctgttataatctctgtaatctcattatcttccaagaaatcatttttaaatcctaaagtttttccttttacacagaaacataacaaaaattatgtttactttgttgttttgcaataatatatttttcaaaaatgtttttaattaaaaaattttatctgaatagggtggatggttggctttaaaaagggagaagagaaaacacattttctggtgtctagattgcctatgtctagagatgctgaaaaggatgacattgacatatcagcaagttatctgattcctcataaaaaggagaaatctattccaaagaaactgagcacaactatacacaacaaaaatatgttgaaagtgatcttttgttcagctttatagatgttaataatttatcatattgtgtcttgtgcagtaaaacattttcaaacacttatatggttccaacaaagttgcagtatcattttgggaccaatcattcagaatttattaaaaaaaggaattaaataaccgaaatgtagatgtaatacactctttaaaagcttcttacaggataagccatcatattgtattggctagaggagcacacacaatcacagagagactaataaaggcttgaacagttgacattgctgaatacctgctggatgaaaaatcaccacaagaatgcatagtgctggcattttccaatgatgcaataacttgtcaaattaaagatttaactgcaaacataaagactgagttaatatatcatctaaagaattgtaccttagccttacaaagggactgatctacagatggctatacatcctgttttgctttcattcatcaggtatcagcatcaattgaccattgatgatcttcttttatgtgaattctgggcaacaggggttctgaaacattaaaagtgttatatgacttttttgaatctggtggtttatcctcaacaactgtgttaactgtgttaacatttgcactgatggtgcaaaaatggtggattttatccaatggtgggtaaaatgactggtgtcttagcacgaattaaggcaatggcaccaaattttattagtagtcattgtattcttcaccaccacacattcgtagtaaaaaaaaaaacagttttactaaaataatgtccttgatgaagttgtaaaaattattttctactaaatctcaacccttaagcacatttaaaaaaattctttgtgacacaatgtgatgtacccataaaacacttctactgcatgctgaaatatagttgtcttttggaaaaacacttgtttgagttgcaagctgaattagccactttttcttttctttcatggaaacaccatcttttcacttggaaaaaaaaagtgacagaaaattgattattcagacttgggaatttggcagacattttcttgaaaataaacagtgatactatcactttagggaaaacaactagttgtatttgttgccagtgctaaaatttaagcttttaaaagtagaagttggaattttgaaaagcttgtatctgctactgtgggatacttagaattttttctgatatcagcagcaacattaatgaatataatatttttttgagacagggtcttgctctgttgttaaggctggattgcagtggcatgaacagggctcactgaatgcagctctcaaccttatgggctcaagtgatcctcctgcctcagctttccaagtagctgagaccacagatgtgcactccactcttggcaaatttaaaaaaattttgtagagatggggtcttgccatgttgcccaggctggtcttgaactcctgggctcagacagtactcctgccttggtctcccaatgtgctgggattacaggcataagccactgcagccagtttgagtttttgatattgcatgaaatgtttgaacatttcgaatacctccataattcagtaaacagatatttcctaatgaccatataatgttacagaatcttacatgagtaaaaataatttcaaaatgcggataggccaatagatttcaatgacttcctgttgtttatcccctgaaccagaagatttacactcaccctagattcttacctttccctcaaccccttcattctattactcagtactcagtgtaaattccacctcccagacagcagacagctcttaagtgtatgctttcctgttcattactatttctaatgccctcattcagaactctggcaacttactttatgatgtcaaatctcttacgtagcataagaggccactgcccacctctcttctctagcttcccccatttcactgtattgtctagtaagctgatcttattatagcttttttttttttttttagacagagtctctctgtcgctcaggctggagtgcagtggtgtgatctctgctcactgtaatctccacctcccaccttgagcactcctctcgcctcagcctcccaggtagccgggaccacaggcgcacaccactgaacagggataattttttttgtttttgtagagacagtgttttgccatgttgcccaggctggtctcgaactcctgggctcaagtgatccacctgcttcagcctcccaaagtgctgggattacagccactgtgcccagcctattatagctctttataaaacaaaaacaacaaaaaaaccgaacatattgattcatgactccctacctttgcattcacatgattcctttgcctggaatgtcccccttcttctacctgcttgggaattcctagctatatctactaaaattctattcagatgtctttttccaggaagcttttcttaacctaactcacgccattaagttattcgctttatttttctaggttatcttctatttgtttctactgttgtactcatcattctgtaaggtattggggctctgtagaatttctgttacaaaattactttttggtttgataatatttacctacattgagcaatcccataagaaacaggcctgtgaaactctctattgggtttcctaaaacaatattgttgagagattatttaattacctagctttctttttatagggacttgccagagaaatatatttctggtcttatcatattagttactcttcagatttgttttagaaaatagtcaccattaacaccttttagaattggttggtggaaagtttccaatcaaaatcgtggtccacctctagcaagctgtaaaattttatgatctccaattagcctcagtttaaactctagtcaggcatttagcttcacaaaaactgaagtcagggatagtcagttttcccatattagtagagagctgggaagtgctgatgtgcacaacctgcagcctgaaatagttgctttttctaaataacagtaaaactgttgctctctgaggatggataggtggatgctatttgttgtttgcaaagcttagggaaccctgtggttgagattttttccaatacatgcattttttttccctttgcaaagggactttggataattgttaattttcccaagaatataattataattcttttattgtttaaatagagttaatagtttatctacagtttcactttctgcagtttcagttatccatggcttgaaaatattaagatattttgagagaaagaggaagaaaaagaggtgtcagtcacataacttttattacagcacatcgttacgtttctatttcattattagttattgttcatatcttactctgcctaacttataaactttaacatgcatatgtatgggaaaaaaaacatagtatatataaggtttggtactatctgcagtttcaggcatccactaaggatatcagaacatattctctgcatatttaggagcaattaccgtatgatatttttttctttctgtgtaaacacatggtgtcatagtccattttgtgctactgtaacagaatatcacagactaataacaaataacagaaatttattggcttatagttctgtaggctgagaagtccaaaatcaagatgctggcatctgggaagggcttttttgttgcatcatcacacagaggaaggtggaagggtgacagagagagcaagaaggggctgaacttacccttttataacatcaccaatcccaccctaatcacctcttaaatattccacctattaatactgttatcatggcaattacatttcaacatgagttttgcaggggagaaacattcaaatcatagcacatgggttaggtgagaaatgaagagtgaggtatacaagagcatccagaaccatactatatacattccagctgttttggtgtagaagcagcacaaatgtagaaactgcattgtttcttgataaaagggtcctggaaagatgaccagctatacagtttccactagaggaaatgcagattggcttgtacgactttagagtatgaaatataaagatctggagtctgttccatgttttttcaggactggtgtgactatattatggataacgaaggaaaggagcctcctttgaaagaagcatctaaattagggatgggctcctcatttggaggatgttagaaactacgaatcaatgtctctcatgttcaatggagctcccatttttatcggtttcatgagactattattaatttatttgaatccaagatgagtctcaaatatacccagaagaaaaaaaattaagaaatgaaaccaagactcctaatgctttgaatgttcgtaacattcgagaaaaatttgagcctgggctatataatcaaagtctaggatttgtgaacctaacagggttccactgtcacctgttttcaagagagtgctgagaaaaattccaatctataccttaaacaattaggttaaatgatttaaagaaattagccttcagaggactgaatttttaatgatttttctacttggaaaatgtgacttctaaataaaaaaagtgcttgcttattataaaaccttggttcaaaggtaaatactatgttctgacaagtgtaaaataagtacaagcacatgtgaaaataactgttaacagcaaatgcttaagaagtgttcttgttttctaaaataaacatttcctgttcctaaagtttttggatcagaaaatggaaaaatataactctagttaatggggatatgcaatttgactgtagaccaataattaattgtcataaagactttaaaaatccttctagattaataatgtgtagaggagtcttagaggattactcagtaaaataaattcaaggtaacaatattaatctaagtttctttaatattcttgatctgggtaaacattttcataaattaattttgtgaattttgagtttaaaatatgtcctgctctaatttcaccatgtgtaaaataaaaaggcaatcatagtattttagtccatataaaaccatgcctccatttataaaaacagactttttttggacagtttaacagttacagaaaaactgaacaggaattacagagagttcccgtatgtcccctcaagccctcttccctccagtttccactattagtaacatcttgcattagtgtggtacatttgttaaaattggtgagccaatattgatacattattaagtccatagtttacattagggttcactctttgtgcagttttattggttgttatattttattggttttgacaaaggtatgacatgtatccaccattacagtatcattcagaatagtttcactgccttaaaaatcctctgtgctccacctattcatccaacccttcccatggaccactggtaaccactaccttttcactgtctccatggttttgccttttccagattaccatatagttggactcatacaatatgtaatcctttcagattggcttttccttagcaatatgcatttaaggttcctccattatccagagatggttttagttgtcacaacttgggtagagagatcaggggtcaatgctactggcatctagtgggtggtagagactgaggtagctcatgagcatcctacaatgcccaggacagccccctacaaaaaagaattattcagccccaaatgccaaccatgctcgaggttgagtaaccttgtgttaagagtgacatgtggcatgagaaatggggcggttttggctcatgttgtgatattctagattcaggtatttccctgagcagagaggctgaaatgctgaaaatttttcatttgatgaccttgatgcttcctttcctgaccatcgtaaagaacaaatggctcctttgctttggcaagaaatactgaaggtggtggcttttttctgtttgttttgaaatgaagtcttgctatgttgctcaagccagtcttgaattcctgaacttctggtctcaagtgatcctcctgactcagcctccagagtagctgggactacaggcacatgttactgcaccagccttcaacgtgattttttttatttcattcaggtgacaaactcatgctgaggttcccaatttttgtctcagagctaggatattctaaatttgtaaaaaaaaaaaaaaaaaaaaaaaagttaagaaatattaactttctatgaaacactctaaatactaacaaagagcttggtgagttctcccacttacctgtgtcccatctgtgcttcagttgcaaatatatatatatatacacagagagagagagagagtcttattctgtcacccaggctccagcgatcctccctccttggcctcccaaagcactgggattatagggatgagccactgcccccagctcagttgcttattttgcattatttcaaggcagtggaggcaaaacgctcaaaattaatttctcacagatcaacatcacatcttggagtaaaacaaacacatattgaaggtattttaatgtatgttttcttgaacttcttctaactaataggggaaatattttcattaacttttaccaaagatttctggatagtgtaaatatatttttctatttgggtaacagtttatagtatgctgttatttctctgttcatttatttatttttatcatatacctcctagagtaagatttaattgatggaatgttttgtggattctgctgtaattaatgcacataatagcagtcagtaatagatttctgtaaacctatatttattaattatctaataccttctccttcattttgctgttgatttccactaagtagattaaattgtgttcttaaaaacagaaattcatttgtgtatggatacaaaacagaatgttcccaaatgcaatcttggatgtgatgctctaaactttagaaatccagcttcatttattttggattaatttctcccgcttggaggctgacacactgttttacatctatcaaatgcatgattataaaattaacaattttgtacaataatgaaattaaacacacacacacatgaactgtaaactatacagcaccatctctgtgtcatagttttaaaaggcacttccagatgacataaaaaatgaagagatattttttaagaacctattgatttttgatctccaattttgtgtgtggggggttgtttttctttaaccctagttttatctaatttgagattcatgaacaaggtatctctaagggaaagagcagcaggtataattattagttattttataagactttgtgaagtctttggtatagttctaaaaacaaagtgaaagaacctaatgtatgtataaaaatagttttgcaagtcaattggtttctaattctttgctttcaacaaaattgaagaagaaccttatacttgagttgtcagctgacagattattaaaaatattatttaataatagcccattatgtgagttttgcatacgactaagaagaaattttaaaaattgggtgaagttgcctcaacaagtctttattttctcattcatttatatcccagattcattaacaataagtaacatttgtcaacatgaaattgggaaaataaagtccctatccatctcattaagagatgcatttctagttaaattttaccattacaaacttacacttttatttaccaaaatgtgtattacagattgagcatccctcatcagaaaatctgaaatgctccaaaatctgaaactttttgagcaccaatatgatgccacatgtaagtactgtacttaacacaacttcgtttcacatataaaattattttaaatatggtataaaattaccttcaggctatgtgcataatgtatataagaaacataagtgaacttcatgcttagacttgggtcccggcctcaagatatctcattatgtatatacaaatattttaaaatccaagataatctgaaatccaacacacttttggtcccaagcatttcaaataaggcatatccaatctgtactgacattattttgatctctaacagttggtaatcctatcttaatccatataacttttttttgagacagcatcttactctgtcatccagggtagagtgcatgcagtggcacgatcatggctcactgcagcctcgacctcctgggctcaagtgatcctcctacctcagcctcccaagtagctgagactacaggcaggagccaccatgtccagtaattttttttttttttttttttttgtagagatgaggtttccctatgtgcctaggctggtcttgaactcctgggctcaagtaatcctcctgcttcagcctcacaaagtgctgggagtacaggtgtgggccactgcacccagcccatataacttttacacttacaacaagaaattaaaaattcaatgtaagaacatattttgttgcaaagaagcagaataggtggctcaataaaagatttccaagaacaaagaaaaaaattacattaggatgtaaccagggttgagaactcaaaaaaaaaaaaaaaaaagaaaaagaaaaattctacatggggggtagaataaaaatatgaattcaaagtgggaaaaaagagcaatgtaaaatttccaaccattaagaaagaggttgtttgtatattttttaaattaatgataatgggtgtcaaaacattatgatatttagattgaattgaacatatgagcgattaacagttttattttaaagtgttaatatggagaatatgttggaaattatatattttttgcaactatctggacacatgttgacaattttaggtctgtctaagtctatgggaggaggcatatgacatttcacaatccttgtaggagagatgtgaagggaagacccctgagctattcttcctccttcttgtgttaccccagtaggaaaatggacttataactggagaagagaagctaggtgtcagcagagacatgatggagtggacatttctttcagtcctttaccaggaagtcctctcaaactgaggaggaacatactaagggagagacacactagtcttgaagcccatggcattcctgaagatccacctcacaccccaaattaccaaaccccaaagctctcttcagctcagtaggttgtcctttaattttcagtaacccttccctacagcagaagaaccaatttttcttttccctcataatttgaatccctcccactaatttatttgaagatgaagatattatcctcttttactaccagtgaaaatacaatgacttgagaagagaaaatgatctgtgtgacgccagggtagaagtggaagttgtgggccctcgaataaaccactagtcttatacttgaagcaggataaacaataaatgccaaacccaaggcagaaactagaaacatggaggaaaagaggcataaatgcctcatattagacagttacattctaagaaatctttcttgcagcagttactttcctacaatgaccaacttcctctgactccaaatttactccttatgtacacttgggttagatattcctttgactatccaatcataccattgtatagtaccatttacacatgcatacatgctcacctaaagaactttttgtgtgtgtgtgtgtgtggtttttttttttaaatcgagtctgggacctggtttcgctccattgagtcactggtgaaaaatttagtaaatctacgaagagagtttagtaagtgtaagaagagtctgctcactgtgtgtgatattccaatagattcatgtgttctacacacagggatctcttggatataagggaggcatttctcaggtgtctgggtgactttctggtcattatccaggttcctggctcagcttcccaggtctctttgaataagcagaggggatccacattcagacaaggctcctggggctctgaccagaggggctggacatccctggtagacctgacattgggcactgagactcctggaaaacttaagctgttaattttgcagttctccatcttgactgcttctcggactgaccatcagttggtgggttttcatcagccttctgcctcacctcctctgatccaagcagcagcagggactcacttgcatgcactggtcttgtaggcagtgacttttaagccacatcctctgtctaccaggctaaacttgcctgcctgagaggcatactccttccatcctctatcgtacatctgtgagctaccaactctggccctagtgtgatactgccagaatgttgtgtacctcatctatttagagtgggaagcccataaggcaaactgaagaggccccgtatcctcactccctttctgctcagttttttcatttatattatctcaacttcactctactaaccagagcaccaaggaagggtaggttagcaattacgtctatgatgactatagagaagtggggagatgacttatgatcctctttgtgctggattccctactgaaggcatctgatggcttctgatttccctggtctgagaagaaagtccctctccacctctccctccttactctacctcaggctgaggggctcaggcaaccttttatgttgcatatggcataggtatctctgcctcactccagaagggaccaaccaatagccacctactcacctacttctgaggtctagtgcctacagacctggtgttcataaatttaagttctggatttaggtctcctttcctgtagccaggtgatcagtgaccggcaaaaatcaagatcccagacttcctgagtaacctcatcaagactgaggtaacagctcacatagctagtgcatagacagatgcaggttacatggagtctgaatcccgtacacatttggaggctccctttgggactgctgggatgcatgaaacatgggatttcactcacagttgtgctcactatgtgtgatattcctatagattcatgtctctacacacagggatttttgatcattctgaattgttgattcccataaaaaatgaatacatggtgatcactgtatatgctgcattactgaatacatatttacgagagtctccaacacatctttacacgtctgaggagtaaaagaatttcccacagattagcttctggttcccatttcaaacctcatttctgttccacctctggcattgggtgtagtatggctccttagtgctccaggccaaaataagtggcacaggggtaaagtcatttctggtggggggtgggggatttggagaaaaaaagaaaggattgcaggggagtacactgggagggttaggagaaattctggagatacggtccactcaatggaggcacatacaaccaagctgagaaacgacatagtacccaacagagttgggagatgtgaaacccaaacatcaatctccacctgggcatagaggaaatactcgatttccaagcaggttctaggttcagaggagagagcccttggttggaagcgccggtcttgcaggatggggtgggggcgttaatgcaaacttctggtccagcagaggtagaaacagaccagatctaagtagcagctcagaggcagcggacttgagggatgaagacgtgaggcccagagggtggtgcctggcagagaaaacagctgccagacaccaaggccacctcgggttaaagggaacaagttatatccaaaaaaaacccaacacggtgaaaataggaagaataaggatatcacctggagtgttctcctgagacactccccaagaacctggattctttaacaatccctccagagcagggacactcagcacatacatctcccacaaagtaaagtgtctgaaggcctgggcaaacccttctccctccccttctctctcctccacgggccggcccggaggaggctcagggatgagaactactgtcactgctgttccccacctcaccccaacgagagaggaatctttagaggtctgtatccctccttcaccaccccgcctgagcgcctgctggaaaacacaatcaccgtctcaaatctcaccctgcaactgcatccaagcgctttctccaagcgttcggggagccgccggaactcttcttccagacaggcgttccgagactccgcacaataggcacctacccttggggttttgagccgcagtgtctgcctctgttcaagtatccaggctcaggtacagacctttcagtgcaggcggcgggaggcgcgaacacggaggaccccctcaggcatactgccgcccgggcggcgcctgacagattgcctccttgggatcggcggacatgccctgggcgctccagctccgcgcgcctcagacacaggctatgattggcctggctgaacgtcaatcagggctcggcgccgtggaggcgggaggaacgctgtaggcagaggccgcttaactccctacggggttattctccgcctcttctagggtaggcaggtgttcccgagtcccttagggggggtccccgcggcggcctgagatgctcggcgccaggttgtcgcgcccttgagctggctgaagtagacattgactctggagagtctgcgtttttcctggtcccagagccgtggtcccgatactgcgcttcccgctcctccagtcccagctcccaggctccgtcttctcccgcttggcgctggagaaacaccggaagagagagtcgcagagtgactgctgtggccctgcgacctgactgccaccttccaggactctagccctggctccttctaaccttcccgcccctcagtgccccagagaggctggtttgcggacaattattcatcagccggaagaaaaggaggtgccagtgttaggcgcagaagagggttggaccagaaaagctggagaggggcaagaggggaaagagggggaagggggaaggcggaaggcggaagaagtcgggaggggtaacagctcgagcttttcctctagcgtagtttctcttctctcggtgccgccccatctgcttcttgcctcagttccccactcgcacccgtgcacctctgcggcaggcgtgtgaaaggaatgggagggggggcttttggtcgggatatctggtcctccagaccccacagccttggctgagaacttacttaagcccactccaactgacttgataaatgagaatcttgaccagcccactggtaggtagaaatgagggacgtcatctatccctgaatggaataacgcgaaaccgcaggtcacgtggatgtgggaatccacagcactggctgcgctcctaaggctcctaagtccacttccgaacctcatctaagaccctgaaagccagactagggacacattggattattattattattttttttatttgagacagggtctcgctctgtcgcccaggctggagtgcagtggtgtgatcttgtctcactgcaacctccgcctcccgcgttcaagcgattttcgtgcctcagcctcccgaggagctggatctacaggtgcgcaccaccacgcctggataatttctgtatttttagtagagacggggtttcaccatgtttgccaggcttgtctcgaactgttgacctcaagttatcctcccgcctccacctcttaaagtgctgggattacaggcctgagcctctgcgccagtcctacacgttggatcttttcccagacctcctcctcagacgtggagcgtacaaatgatgctccatcggttactctgatcctgactttgggactgccagataaaactgggagaaaccctacatttactcttactgtaacgtattggcttgaaactgcaggtcagaacccatttatgttgagaccaaaagactttttttccaagtagaatgaaatagaataaaatacaattgaaaatacttgcctgcatcacaggtaatgagagtaactatagtttcatgaaaccgttgtttcagttaaatatgtttttgcgtgtgtgcatgtgtatcgggaggagatatgtatttcatatatatatgtagagaggtggaaatcaacaacaaaactccataatttttcttgttttctaacagttcttgattttgagtaaaaataattctttaagaacaaaattttgagccagctaacgaaagatcagagtcaagcagcctctcattggggcctgaatagaggttcatcttatttggctttttcgtttttttcctatcttgtggactccttttaaggcccagcaaggaattaccctccccaagtttccactctctgcttggttcagccattcagctgtctctcgggctctttgattaataaaaagtccagtagagctattttatcctatgcatgtgtgggaagagggcaatgccagtgattctttcctgatttgacagaaaattcacaaatcacgttaccttctgaagatagagattttaagctcaaacattatcaccagagaactgaattattaagaaagatgagtggtcaaaagtacagatgttttacagattaagggtcattttgtcaggtcctgtccaaaatatttgaagtctaggggtttgaaaaattgttagaaataaccatttatgacaacagttttcatttattgttctctccagcttcaggagcaggggagaacatttttttccttcttaccttgctgagaattttttcaccagggtttcaaggctaagaactgaaattccagcattgacattgaattaaaaagaagcaagcccttttaggaagtcaaattttattatatgagatggaatgtaatattgagattacttattacttaggcatgggataggggggcttttaacaacagaccaaaaaaaaagttggaaggataggaatgaaataaagcaaactttcattattcatagatgatacaattgtctacagagaaaaataatctaaaacataagaattaagagtttggcacagtggttggctaaatatataaacaaatctattgcattttctataaaaacaaaaaagtagaaatgtgattaactggtttatataacaaacttacagtacagttgacctttgaacaacatgggcttgaactgtgcaggtctacttatatatgattttcttctgcctttgccacccttgagacagcgagaccaacctctcctccccttcctccttcttagcatattcaccatgaagacatgaggatgaagacctttatgatgctccacttccacttaatgaatagtaaatatattttctcttctttatgattttttaaataacattttctttgcttttctgagacaaggtcttgctctgttgcccaggctagagtgcagtgttatcatggctcactgtagcttcaacctcctgggctcaagcgattctccacctcagcctcccaagtagctgggactacaggtgcacgccaccctacctggctaaatttttaattttttgtagagatggggtctcgctatgttgctgaggctggtctccaactccttgtctcaagcacttctgcctcagcctcccaaactgctggaattacagccatgggccaccgcacctggccaacattttcttttctctagcttactttactgtaagagtacagtatataacacataaaaatataaaatatatgttaaataactttatgttattggtaagacttctgatcaacagtaggctattagtaaagttttggaggagtcaaaaattatgtgcagatttttgactgcacaggtggtcagcgctactaaccctcgcattgttgaagggtccactgtaatcaggaataaattctcaaaaaggaaaggcatgcaagatcttagtggggaaaattaaaatcattaaaagaagttgaagaagtactgcacagatggagagacacattcatggttaggaagcatcaatatcattaaaatgccagttttccccaatgtgatctatagtttcatgctatttctagaaaaatttcaacaaaatgttttatagaattggacacaatgatattaaaatgaaacgaaggaacacaagttcaagaagagccaaaataccattgaaaataaagaggaagttggggaatttcctgactacatgagaagatattatatacaccactggatttaagaccatgtgctattattggtgagagagggagtagacaactgggccaatagaatagaatggaaagagtgtcaggaccccttgtatgtgaagaatggtcattaaagaccagtgggtaaaggatgtataattcaataagtttgaatttatgacactggattagtggatatatatacatcataataaattccagatgaactaagtaccgacgtattgaaggcaaaactgtaaaacttttaaatgaaaatgtgaaagaaatatttgtatgacttcaaggtagaaaaatatttattaaaaagacacacatacacattttaaaaacaaaaatgttaagagaagatgaataaatttgaccacattaaaattagaaactttaatcaaaacacactctaaaggaaaaaaagccacaatctaaacttatttatatcacacataatttacataggatcaatatccagaacatctaagaatagccccataggaaaatgatcaaaagatgtgaaagggcagttcacaaaaagggatatataaaagaccaataaacgtacaaaagttaagctcacaatagttatcagagaattgtgaattagaacagtccttgaaataacattttaaaatcactaaatagacaaacattgaaaagtctaacattatcaaaaatcaatgaggatgtagggtgaggggaactcatactctgatggtggacttcaaactgaaataatctacttggaaaaaaattggcattttgtagagttgaagctgagaatatcctaaagcatagcagctctacccttaaatatatatgcaccttagggaaattattgaataaggcaccaagagcaatgtgcaggaaaagtcatgagagcattctttgtaattgcaaaaagctggaaacaacccagtgtccatttgcaggtaaactgatacacaaattttggcataatcataatgtggaattctctgcaacatcaagatcagtggaatacagataaaataataaacttgcataattcttaaaatcatattgttgaatgaagaaaacaacagaaaactacattttgatattaattatgatgttaatttgttgtcagacaaagacaatatttactatgatgaaaagcaagataatgatcaactccaaatttggaataatagttgcattttgcagagaggaagggagattctaagggaagacaaatacaggaaactttaatgttaagggtaacgttccattccttcatgtgactggtgggaaaaaatggatgtttaaaattcttgtagatatgcatcacatgcattacttatttgtagaaaaatatttcaaaaactggatcataagaaaaaaggaaaaagatgtataagaaatcatttgcatagagacagaagtaacaaaggcaatttgatgaaatttattgagacagaagactaaaaaatgaaaaaacatggtaaatataaaaatatgatggcagaagtaatccagatatatatgcatttgtaatgtccatttatatcattgcattaaatctaaatttttctgctcagtaaagatggtctgtgtgtgtgtgtgtgtatttgctattcaaaaagtgctggtggcaatggcttatacctgtaatcccagcactttgggaggccaaggagggaggatcacttgagcccaggagtttgagatcagcctgggtaacatagcgagaccctatctctacaaaaataaaaaaattagccaggcgtggttgtgcatgcctgtagtcccagctactgaggaaactgaggtgcaaggatcgcttgagcctggaaggttgaggttgcagtgagccgtagtcgcacccctgcactccagcctgagcggcagactgagaccctgtctcaaaataaaaacaaaaacaaacaaaaagcacctaaaacaaaatgacaccgagtgattaaaccaatggacaatgataaactcaggcaaatgctaacaaaaattaattatggatagaaatactgtcttactccattttgtgctgctataatagaatatccaagactggataatttttaaagaacagagattgacttattacagtcctagaggctaggaaatccaaggttgagaggcctgcatcttgcaaaaatcttctggctgcctcatactgtggtggaaggcaaaagggataaaaagagagctgagagagagaaagagaaagagagagcgcccaagtgcaacaggttgaattcacaggcttttagcctttttgtaattggcattaattcatttatgaggatggagtcgtcatgacctaaacacctctcatcattaagcctcacctactaacactgttgcattgaatattacatttccaacatatgctttttggggacacattcaaaccattacaaatactaatattgaacaaagtagaataaatgatgaagaaatttttcagtgtcaaagaaggatactttattatgctaaaatgtacaattcaccaactacccataagttataagccttcatatcctaaacaagtctttgaaagttagggaaaaaaatgtgctttgttaggaaggataaattgacacatttaagagcttttagcatacttttaaactaaactgtcatatccaattgtaaaataatgtgaatgtaagatattttgctaaagcaaataatgatcttaagttatcaaatatttataaaattgtgtactcaacaaatagtgaatgcatattttcccaaacataatgcattaaaccacaaagtaaaattaaatagaaattagaaactacacgggctatattctctcaccggtataaaacacatacatagaaaaacaaaacaaaactaaaataaaacaaaacaaaacctcaccaaaacagtactaacaagaaagcctccacttggaaacttaaaaacatctcactaatttttgggttgaaaaggaaatcaaaattgcaattcaaaggagttatgtttttgctaggaatatggagggaattcagttcagaattcatttctctatatagtacagcaaagagaatgaaaaagaaaaccacacaagaacctcatttttagtgaaactaggaaacaaaaagtatggttacatcccaaattgcatgtcatttgtgcttaaagcaacggagagcagaactgggcataagaagccaaaatgttgctgtggcaacagatgaaagcgtggagggaactagtggtgcgggatctcggaaagggcccgaaaatattctctctctaagagtagaagccagcctaggttggagctgttggcagttggcctgagctacagtgaggcccagatgctggggaaggcagaagaaggcccacatattgggggagcagactttgttttggaggttccaaggtggcagataacaaaggttccctctggaatgcagggggtcctaacaccgtggtagaatccttcctgaaatagattaaattccccaagttggaaaaaacatggatgcagcgtattttaagataaagtttacgtgttagtaataaaggattggtccttcggttgtaaaacctgggaggttactattgcccatgtcttctctcaccaacccatcatcccacccccatccaataggagtcttccactaatatctggtccaggaatgctcaatttattcagaataagtaggaaaagaaatggcacagttccacataaatatgccatgagaaaaaaatgtttacagaaagcagcaagatttccctccagaagtaatgaagcaacctcagccatgaagatcatggagccaaaaggatgaccttcagcagaagcagttacgagccaaagaggtccaagggcactgagggaggagccaagtggtaagggccacctctggctgggatccagggtgcccaagtgggaaaatgagcaagccagagagtgcttggtctagggattaagaaaagcacacagtaataggttggacactaaatttgaaaatgaacagtgagaaaaatgctgtggggaccaggattgaaatgaagtaacagaacaattaaaattacatgatccagggacagagacttgaactcataaacaggcctgtgttgcccattagtcacaaggggagcagtgagccattgttaaaatgccaaggattcccaatgcagtttacttggaactttgcccagcgatgaaggagtctgacttgtcttttctgtaatagttagaatcaaagaaaaataaagcacagctggtgggagggtgagaagcaagcatcatgaaccacggtctaattcaaggatcaaactgctgtccagttctggcagattttggattgcaaggggaataaagctgagaggccatattggcacctaggcacagtgaggtgagtctggccacgcatttaagaagcccctgcaaaatgatacaggtggttactaaaaaccacctctggcctctggaaaaaaagaaatagcatctcccggataagaatatctgggtctcacacctattgaccaggtcgagatagggttcagttggggatgggatataataaaaggcatgggtaaagaaactgggcagaggcatagtgcctgcatgttggagattaaggagggaattcggaactcatttttctatatatattacaacaaaggttaagtttggaggttaagtaaggatgctgcagctcactcatggttgcttttccttcagagtactcatgcctcggcttacccagggggactcaaggagaggaatgtgtgtgcgcatatctatctatctatctatctatctatctatctatctatctatctatccatccaccttctaatctacctaaatcaatcactgtgtgtatctattccaaccacaatggactcctatcattcaatttcatttagtggtacatctcagcccagtttacagaaaagctgtaaagggctgtaaaaggctgtatgagaacataatctgaaaagcgttgctcaaaagagcatattatatattattgggcatttatgaagaaattagatctcacactgagctagttaataaagatttataattacaaatgggctgcagcatgtgattctgaacttgactatttccttttgcccttcagtttcagactatgatatggattatgattctctaccaccccctagtggaaattcattcatttctttttaagtcctgtttcttctaatcatttagtctaaatgattagactaaatgagaaaattacatagtaaatatctggattcactcttgttataaaaggttcaaaccggccgggtgcggtggctcacacctgtaatcccagcactttgggaggccaaggcgggcggatcacaaggtcaggagattgagaccatcctggttaacacagtgaaacccccgtctctactaaaaacacaaaaaattagccttgcgtggtggcgggcgcctgtagtcccagctactcgggaggctgaggcaggagaatggcgtgaacccaggaggcggagcttgcagtcagccaagattgtgccactgcactccagcctgggctacagagcaagactccgtctataaaaaaaaaacaacaagttcaaaccatacagaagggtacggagtaaaaggtctcctttgtttctccctcctccccattccattctaggtcccaaaggtaactgtgtgtagtttgtgttatactaggatatttcctgtgcttttacacattccaggtatatggcaggaaaaatcctgagacatcaactgaggattattttcctcaggcatctttctacaacagaggcagataacgcatttcccctcatgccatgggagacagaccacagcaaaacagcaatgaccaaaagattaagatttttcatttaaaattttacatttgaaaaccatggtaggccaggtgtgatggtcacatgcctttaaccatttaggaggctaaggcaggaagattgcttgagcccaggagttcaagaccagcccggacaacatgacgagactcagtttctacaaaaaaaaaaaaaaaaaaaaaaaaagaaaagtaaagaaaaaaaaattagctgggcatggtggcgctcacttgtggtttcagctactcaggaggctgaagcaggaggattgcttgggcacaggaggttagggatacagcaagccatgttcaggtcactgtactccagcctgggtgacagagtgagaccttgtctcaataaataaataaataaataaataaaatagaaaacccagtagaggccaaatgaaagaaaggtctttggagatgaaaaaccttagattactagatatctgaagtcagcacttgttccataaataatagatttgggaagtactccggataatcttagagccaattttcttctgtggaagtgataagaatccacaggctgaagacagaaagagtgtcaggaactggttttggggtcttgcactctgtaatccagttaaactgtgtgacagagggtcagtgcctcctccaactcagatattttgggcatacaaggatgggatcaaagagtgtgctgtttctggtctacggaatattacaaatttgaatgaaataaaaatatttctgacagtttctaaactctcttttcttagtactcaatagaatggactgtcatccatgctgggtaaggaaagatcttgacaaggaaaggaaggaatcagggtttcatgagagacagggttctagggatccaagcaccatgatgaggtaatggctaagttttctcttgggtaatgcaaagaaaagttgacctttactgctgtgaagcaaattagaagctaacccggggtgcattcgtttggtttcttccagaagcatccctgacacagggacatgaatgaaagtaatttattttggaggtgcatgaaacttcagtagcagctgagtaaaagattgggaagggaaaacagccaacgaagggtgaatgactggaacttaatcccctggggaaattctgggaaagcacttgcctcagagttaacccagccacggaaggagggagttgggcaattgtacatcaattcccattggttgaaggctgctgcctgacacgtgaactcttcggcccttctagtctgctgtgagtcgggcagagtggcccttcttggctttgaggaagccttcaggaatgatgcaaatgtccagccagtgtgcactacagtggtaaggcccaaggaacatggcaggtattagtagcatcagccataccaggtctatttctagttggagaacccttagatgactggagcctgtgatctcttacatctgtaatatctgtgatcagaatggaagaattttctattgtcttttccttttcaattttgcccaagccttcataaagttttgttaaaactttgacaacagtcttatttttacattcctttaatcaagaaggacaggcctatgtccaaatataggaggatgtattagtttgctagggctaccataagaaataccacagactgaatggcttaaacaacataaacttattgccgcctggctctggagtctagaaatgtgagatcaaggtgtcagcagggttggtttcttccgaggtctctgtccttggctggcagatggttgtcttttccctgcatcttcctatggactgccccctgtgtatgtatgtcctaatctctttttatatggatactagctatattaggacctactttcataacctcattttcacttaattatctttttaaagactctaactccaaaaaaaattcacgttctgaggtactgggtttattcaacattatgaacttatagggggacacagttcagcccaaaaagaggaaaatggggcaaagggaaaatccttcttctccatcttctttcctgttctctctcaaaggccaaggtgagtgagagcaacattggatcatgggatcttggttgccctgcaactcaagagatatttggcttcaacgttagcagtgagcaacagcagagctgagaacagtggtatagaactgagtcacactgagtcaggctacatttcccaggctaatttgcaaaccagaattccagatataatttttattcactcaaactttccactcatgaacttcttaaatgtattttgaaaaactatgcacatcctcatacatgttttttaaatttaactttttattttgaggtaattagagagtgacatgcagttgtaagaaataatacagacagaaccttttaccctttaatccagtttccctgatggtaacatcttataacacttcagtacagtattgcaatcaggatattgacatttgtgtcaatgtcaatattacagtcaagacagtatttttgtcactccaagtatcccttatcttgcccttttatggtcggttcacctccttcccacccccatcacttccttaaccactggcaactatgaattttttctctatttctgtacttttgtcatttcaagcttcttaatacaaaatgttatacaaatggattgtgctttttttttcttttcaataaagtttattttatttatttatttattttttttgagatagagtctcactctgtcacccaggctggagtgcagtggcaccatctcagctcactgcaacctccacctccaaggttcgagtgatgttcatgagtcagcctcccgagtagctgggattacaagcatgtgccgtcttgcttagctaatttttgtatttttagtagagacgggtttcaccatgttggccagctggtctcgaactcctgacctcaatgatctgcctgcctcggcctcccaaagtgctgggattacaggcgtgagccaccacgcccagcctggattatgcttttgatgtcaagcctacgaattctttgcctggccctacatctcaaagattttctcctatttttctaaaattttaatagttttacacttcacatttactctgtaatccatcttttttgtttctttatctatttttagagatggggtcttgctctgttgctcaggctggagtgaagtgacgtgatcacagctcactgcagtatgtaaccttttgggactggcatttttcactcagtataactctctggagattcatccaggttgttgtgtgtatcagtcattcttttttattgctgagtattatttcatggtataagtgtacaatagttggtttaaccatttacctgttaaaggatatctgggttatctttggctacaatgagtaggcagttagacaaacatttgcatacaaggttttgtgtgaaggcattgtctgtgcttgtgtatttgtgtatgcaagttttcatttcttggggctaaatacccaggagtacagttgctgggcaggatggtagtagtatgcttagttgttggatttttgttgttgttgttggttttgttttgtttttaagaaactgccaaatcatcttccagagtggctgtaccattttatattcccatcagaaattatgagagatccagtatctcttcttccttgccagcatttagcattgtcgccttttttttttttttttgagaaagagtttcactcttgttgcccaggctaggtacaatggtgcgatctctgctcaccgcaacctctgtctcccgggttcaagtgattctcctgcctcagtctcccgagtagctgggactacaagcatgtgccaccacacctggctacttttgtattttcagtagagacagggtttcttcatgttggccaggctggtctcaaactcccgacctcaggtcatctgcccaccttggcctcacaaagtgctgggattacaggtgtgagccaccgcacccagcccattgtcactatttttattttagccatcctgataggtgtggagcgattatctcattgtggttttaatttgcatttccctaatggctaatgatgttgaacaacttttcatgtgctaatttgccatttttatatcctccttagtgaaatattaccttaagtcttttgcctgttttctaattggatttttaatgtgttttctttgttgagttttgagagttctttatatactctagatactagtcctttgttcaatgcatagtttgcaaatattttctcctactgtgtagctcattttttcatccacttaccagatcttcacaaagcaacagttttacattttgatgaaatccaatttatcagtttttcctttcatagatcatgctctcaatgtcaagcctaagaattcttcgcctagacctatatctcaaatattttctatttttctaaaatttaagagttttatgctttacatttactccataatccattttgtttatttattttaattaattgtatctggtaaaggttaaggtattgcatttctctgacatttttttttttttttgaaacagagtcttgctcagtcacccaggctagagtacagtggtgtgtcacagcttatgacagcctcgaactcctgggctcaagcaatccttctgcctcagcatcccaagtagctgggactacaggcaggagccaccacaccaacattatttttcatttttgtgtatagacagggtcttgctatcttacccaggctggtcttgaactcctggactcaagcaatccaatccagttggaattaaattttgcataaggcgtgagacttaggtcaagtttcatttttattttattatcttgcctatggatgcccaattgttccatttcaccattgttcaattcactatttgtgaaaaaggctatttttcttccactgacttccttttgcacctctttcaaaaatcatttgggcagattgtgtgggtctttttctacgttctctattttgttccactgatttgtgtgtccattcctctgctagtaacacacagtcttgattactgtagctataaaacaatacttgaaatagggcagactgattttcaactcactttattcttctttttcaagaatgttttaggcgtcggcgtcgctcccgccctggagctctaggcccgcttttccccgcttgagtctggcgtcggggtcattgtgtcttgacaaccgctccggtacccctttccgaggcagcaggtgcggccgctttagccttgagcgggctccgcgtctgcctgctggtctctgctagtgccgacccttctgttcgcggaccccacgccaagcagcgaccctgagccgacaggcggagcacccggcaatggcggcctccacggcctcgcaacggcccctcaaggggatcctgaaggacaacacctctacgacttcctctatggtggcgtcggccgaacatccccgtgggagtgtccacgagcagctgagcaaaaaatcccagaagtgggatgaaatgaacatcctggcgacatatcgtccagcagacaaagactatggtttaatgaaaatagatgaaccaagcactccttaccatagtacgatgggtgatgatgaagatgcatgtagtgatacagaaaccactgaagctatggcaacagatagcttgctaagaacttagctgctgctgaaggcttggagccaaagtatcaggttcaggaacaagaaagcagtggagaggaggatagtgacctctcacctgaagaacgagaaaaaaagcgacaatttgaaatgagaaggacgcttcactacaatgaaggactcaatatcaaactagctagacaattaatttcaaaagacctacacgatgatgacaaagttgaagaaatgttagagactgcacatggagaaagcatgaatacggaagaatcaaatcaaggatctactgcaagtgaccaacagcaaaataaatcacgaagttcatagaagggatttgttcaacactcttattgtttgttagatatgaaccccgttgctataatacattgcttctcgttctccacaagtcatgacttaagtaccaaagtgcataccagttattatatattgccaagaattaaatgaaaaccttaaagactgattagactgaaaatgcctaattgatatatatattcttgtgcctagtactttaccacaaatacggtgtaatatcatcagtccaaaactgtattacttttgtaaaaatactggttaatttgtatattatatagcttttcatgctttagaggttaaacaatatctttggggggggggaactaatttattttcatcactctaaatgtggtgatagctcttataaagtttgttgacttttttttttaaccaaaagccaattgaacaacaggatatatatgctgataaatattcaggctgaatagtattttaacacttgtcttcaacttgatttgtctgtttaattgaaaaggattgtgacctggcacggtggctcacgcctgtaatcccagcactttgggaggccgaggcaggtggatcacgaggtcaggagatcgagaccatcctgactaccacggtgaaaccccgtctctactaaaaaaaatacaaaaaactagccaggcatggtggcgggcgcctgtagttccagctactcgggaggctgaggagggagaatggcgtgaacccgggaggcggagcttgcagtgagccgagattgtgccactgcactccagcctgggcgacagagcgagactccgtctcaaaaaaaaaaaaaaaaaaaaaaaaaaaaaaaaaaaaaaagaaaaggattgtaagagttactgttacattttctggcctactacctttaaaattcctgttgcatttctttgtatttacaaggaaaagactgaactttttctcatcaaaactagcttttttctcacaggttaaacttgcaccaatgtctgctctttttttttaatgtttttggtactctgggcagacttcagttttttaaaaaataaagattctaatgcagctatcttggcattccctttaaatacctgtcttaacctcctacttttatttcctactcctttccacacacatgcatacaatcctttaccttttaaagaatcattaagactgtcacacattaggaactctttcgctcactcttctgtcatttgctgcaatattgaaattcttattttgaccatcaatgcctattaattcttctaatacatgaagaaaatgattgagtagcagcagtactataggtgggaaatacagtttaactgctgaatttttatacctctctgatttatagcttgctaattaaattgctattaatagtttgtttggcttaattagacttaagaaaacaacaggttttttttttttgaggtttttttttttttttttgcatgaggagagaattgtatgtaaccagtgatatgattattcctgaatgtacagacagaagtaagcctggacattgtttaatttaaaaactttagtccctgctttaagggaatatgataatgtatactatgacaaatgtactttattcttctaacacagtaagaattacttggaactttttcctgaaactaagtgcaggaaagccctgtgtgtcttggtttagtgatggtttcatttctagccatacaactgatggattgtatacaatttttgttagtgccaaaataatctgttatatgaacagacttctaaaataatttctgtatattatatatgtaagaaggcttttattgaacagcttattttccacttgcaagtttatggaaatatcaatatgtcaaaataaaaagtgggacaattctttgctgttagaagaatgtgcttattattttgatttcttaaatggtacataatcaaagtactgctgaactataggtgcagtattctactaaacatttcagctagtaataccactgatttagaaacaaaactgtttatttttgctttctgaatttagaatgctgggattacctgtttaaatatgttttagggaatatagagattaaatctgtacatacctgtgcacatatattcatgcaccctctgattttggttttctcgtttttgagttcttagaaagtatccacatactcttcttttagtagaagtagctgttttagagagaagaaaaggatgagactttaaatagttgattctttttgtgttttctacaaacttttttgaattttaaatcacaagcaaactaattttctggtttttagaaagtagatgatgatttcagaggagtaagacatgccaaacagcgtgctcggtaggattttaggtagtcaaatgcagctgagaaaaagtattttcaagtcataagttgctaattgatatgctatgaactagtcaaaataggaaccatatgattcatgttagattttcctctagagatggatctgaatgttcagttccagccaaggtagattttactttcaactttttaatcaatatcactttctgtgcttaatctctttggtgttaccttgtccattttcatttgtctaaaattctgcagggatgactacaatttggcataatggtataaatgaattgttaagggtaactttaagttgaagattaaagcaagatgccattttccccatgtctttcattttgtttacattttttccctttaagttagtatacactacacatactacaataaaatataataatatgaaaaaagaatattttagatattctagtccctttgcctttccatgtaaattttagagtaatcctacctataattaacaaatcttgcaaagattttgattggaattgtgttaaacttgtatattggtttggggagaattgacatatttactatattgaatcttccaatccatgaacagtatttctctccacatagatagagactgaatagatcttctttgatatcgttcaccagcattacatagtttttagcttgcaagtcttgcatgttttgttagatttacacataagtgtttcatgtatttgagtaattgtaaataatatatttatatttttgggccaggcgcggtggctcacgcctgtaatcccagcactttgggaggccaaggtgggcggatcacaaggtcaggagatcgagaccatcctggctaacacggtgaaaccccgtctctactaaaaatacaaaaaattagccgggcatggtggtaggcgtctgtagtcccagctactccggaggcaggagaatggcgtgaaccccggaggcggagcttgtggtgagccgagatcgtgccactgcactccagcctgggcgacagagtgagactccgtctcaaaaaaaaaaaaaaaaaaagaaaaaaaaaaaatatatatatatgtatcatttgttcattgtgagtatgtagaaatacaattgatactggtttatcctgtattctgttaatttgctgaaatcacatatctagaagtttttctgtagcttccttgtgattttctacatagacaatcatgtcacttacaaatgggagctgtttatttcttacttcacaatctgtatgcctttaatctcctttttcatgcctattgcactgtctagaacttccaacactgtgaataagagtggtgagagtggacattcttgccttgttcctgattttaggtagaaactattcagtctttcagaatcaagtatgttcaccataggatttttgtagacgatctttatcaagtaaagaaagatctcctctactcctatatttctgagattaaaaaaaaataatgaatgggtgttaaagtgggttaaatactttttcttcatcaattgatatgaacaagtaaattttcctcttcagcctataatatgatggattacattaattaattgtgaatatccaaccagctttgcatccctgggataactctcacgtggtcattgtatataattctttttatatgttggtaaattccacttgctaatattttgttaaagattgctgcatcatgaggaatattagtctacagttttcttttcttcccattgtcattgtttggttttggtattgaggtaattctagctttataaaataaactgggaaatgcttcctctgcttctattttctggaagagattaattggtgttaattcttctttaaatctttggtagaattcttcattgaaactatttgttcctaaatatttccttttgtgagtttttaaattatgaattcaatttcctcaataggtgtagacatttttgaattattttatatttagtgagttgtggcactttatattttttgagaaaatgatccatttaatttaagtgtcaaatttatgtgtgtagaattgttcatagtattcttttgttatccttttgatgtctgtagaatctttgatgatatcccatttcatttctgatgttggtagcttctatcttctgtcgtctttttttctgagtcttgctagtggtttgccaattttattaatctttcaaagagccagctctttgcttcattgatttttttttgcttttgtttttctgttttcagtttcattgttctgcttgctttttattttgttattcttttactagattcttgaggtgagagtttagattattggtttgagacttttcctcttttccaatgtatgcagttagtgctttaaatttacttctcaaatgcaaatcaaaaccacaatgaaatgccatctcacgccagtcagaatggtgattattaaaactcaagaaacaacagatgctgacaaggttgtggagaaatagaaatgcttttacattgttgatggaatgtaaattagttcaaccattgtggaagacagtgtggcaattcctcaaagatctagaaccagaaataccatttgacccagcaatcccattactgagtatatacccaaaggaatacaaatcattctattataaagatacatgcacttgtatgttcattgcagtactattcacaatagcaaagacatggaatcaacccaactgcccatcaatgacagactggataaggaaaatgtacatatgcaccatggaatactatacagccataaaaaggaatgagatcctgttatttgcagagacatggatgaagctggaagccattatcctcatcaaactaatgcaggaacagaaaaccaaacaccacatgttctcacttataagtgggagctgaacaatgagaacacaaggacacagggaggggaaaaacacacactggggtctgtctggggcgaggttggagggagggagagcatcaggaaaaatagctaatgcatgcttgtcttaatacctaggtgatgggttgatatgtgcagcaaaccaccatggcacatgtttacctatgtaacaaacctgcacatcctgtacatgtatcctggaacttaaatttacctcttataactactataactgtatcccacaaattctgatatggcatattttcatttttgtttagttgtgtttattgtgtgtatttttaaaaaatttccttgagacttcctccttgacccatgtatttctaagtgtgttgttttgtctccaaatgtttagatattttcctgttgttgatttctggtttggttccattgtggtaggagaacactttctttatgattttatttaaaaaatttgttggtcttttattgtcttagatatggtctatcttggcatatattctgtgggcacttaaaaaaatgttattctggctgggtgcagtggctcatgcctgcaatcccagcactttgggaggctgaggtgggtggatcacctgaggtcaggagtttgagaccagcctgatcaacatggtgaaacctcatctatacaaaaaataaataaataaataaataaataaataaataaataaaaaattagccaggcatggtggtgtgtgcctgtaatctcagctactcaggaggctgaggcaggagaattgcttgaacctgggaggcagaggttgcaatgagccgagattgtgccattgtactccagtgtgggcaataagagtgaaactccatctcaaaaaaaaaaaaaaaaaaagtgtattctgccatggaatactatgcagccataaaaataatgagatcacgtcttttgcagggacatggatggagctggaggccattatccttagcaaactattgcaggtacagaaaaccaaatactgcatgttctcataagtgggggctaaatgatggacacatggacacaaagaggaaaaacacatactggggcctattggagggtggaggttgggaggaggcagagggtcaggaaaaataactaatgggtactagacttaattcctggatgatgaaataatctgtacaacaaacctccatgacactgtttacctatgtaacagacctgcacatgtacccctgaacttaaaataaaaggaaaaaaaagaaaaaagaaaaaggaaaatctcgtggaatctactaaaagcaacgaaaaagaaaataatgtatcttctgttgttgggtggtgtgttctataaatgttgattagatcttatggtttgatgttgtttattcttctatgttttttctcaatttttgtctatttgtttaatcaattgttgagagaaaactattgaagtcttcaactatcattgttgacttgcctattttcttttcagttctatcagtttttgctttacataatttgcagccctgttgtttggtgcatacatatttaagattgctatgtctttttggtagatttacccttttattattacatagtgttcctatccatttctagtaattttctttgttctaagtttatttgatattaatatagcctccctttattattttttgtctgatatatgtttttctatcctttaacttataaaccgcctatatcattatatttgaagtgagtttatcataaacagcaaataattgagtctttttttttttttttttgagacggagtctcgctctgttgcccaggctggagtgcagcggtgtgaagtggtgtgatctcagctcactgcaacctccacctcccgggttcaagagattctcctgcttcagcctcccgagtagctggggctacaggcttgtgccaccacagctggctaatttttgtacctttagtaaagatggagtttcaccatgttagccaggatggtcatctcctgaccttgtgatccacctgccttggcctcccaaagtgttgggattacaggcgtgagccaccgcacctgacagagtcatatttttaaatctattctgccaagctctgtctcttaaaattgatgtatttaggcgatttatatttcctataatattgttatgtccaggcttaagtctgacattttattttctgttttctgtttgttctctctgtttttcatttctttgttttctttttcattgcttcctaaataattttaaaattccattttaatttatctatagctgtgtgtgtgtatgtgtgtgtacctctttggatagctcttttagtggttgttctaggtattacattatatttatgtaacttatttattgtcattaattaccagtctgagtgatgtgtagaaatttcttctctctttgtttaccctccctcatttataattgcctgtaatattttctctatatacatttataaccatatgatacagtattatacgtttttcttcaatcctataatttaaataactcaagagaagaagtaaagtccattttttaacccatattttttcttgccatgttctttcttccttcctgatgttccaactgtcctcaatttaactttttgtttttttagggtagacctgttagtgacaaattctgttagttttccctcatctctgtatgtcttaatttccctggatatttttgctgatatagtgttctaagttgatatttttttttcctttcagcactggaaaaaggtggtgacctccttcgggcttacacagtttctgatgaaaattttgctctgtcatttttttcacctgttagatgtcatttatctcactgctttcaagattctttttatctttaatttttagttaattactatgattttggtgtggctttctttgggtttgtcctatttggggttcactcaccttcttaaatcactaggtttatgtcttctgccaaatttgggaagttttcaaccatatttatttgataatttttttcagcttcactctctttttcctctcattttgggactctgagtacatgaacattaaatcttttgttatagccccatgggtccctgaggctttgtccattttttccagtgtattttctttctttcttttgttcagattaagtgattgctattgctgtgtcttcaaggtagctaattctttcctctgttctctccttctgctgctgagcttatttactgggctttttattttggctattgcacttttcagttctaaaatttccacgttttcttccgtatatatcctatttttatgctgaaacatcctatttttttcttttctgctcttttcttcttctttctttttttaaaccactgaactggacatcctatttttttcattcttttaagtgttaattgctcatcaaagcattttaataatggtggctttaaaatcttcatcaggcttttctttccgttttggcatctattttattgtcttttaaaaattcaatttgagatattcctggttcctgatatgacaaataatttccaattgaaacttggacatttcaggcattatgttataaggctattggtcttatttaaactgttttagctggcttcttttaacacctctccagcaggtaggcaggtgagcttcatgacgccaggtaggggtaggagtccaggcttctcactctgccttcattgacacctcagataggtccccattattactgagtggggacagaaattctggctccctattaggtgcccactaatacctccctggttggttgggagaggagtgccacttactatccctcacatgacctttattgacaccaagatgggacagtggagtggaggagtgagtggtaggtatcagggagtggttgctggattaactctgggtggtgatgaaaatcctgactctccattaggcattgtctgacatcaccctagaggagaggggaagagatgcttcattactgttgggtgaggaatggaagtctaggtttccattgacatttcaggggcttggggaaaggagtacattttcaccaagagggcatgaccatcctgactccctattcactttctctgacaccatcctggtgtgtgtgcatgtgtgtgttgaagtgttgggttccttatgacagcctggtgagggtgaaagtctaggctcctcatttgaccttagctggtgggggtggagtcgcagttttttctgtggtgtttggctggccccattacccaagatggagtgtagtggtgcgatcatagctcactgtaacctcgaactcctgggctcaagtgatcctcctgcctcagccttcagagtatctaggactatgacacatcgaactatgcctgactaattttattattattattcatagagacagggtctcattatgttgcccagggctggtcttgaactcctggcctcaagcgatcctcctgcctggcctccttcccaaaattactttaaatgatataatagctgacagcttgaataggtcctctttattttgttggaggcagagtgttagaagtgacctaacaaaaaggatttgtttcttgtcactagactcattcactgtgtcaatgagtgtgtcagtggtttgtgggaagcaaacttaaatgaaaatgtatatttttaattaaatgttatgagatgctttttttaaactattggctcttgtgaatttcagaaaaatattgcaagtcatttgacttagctacttagcttgcactctatgtaaaaattttagaattttacctctttgaaaaactcctaatatcaatagtgatattgttgttttgcagcctcaaatgattttgttactttggactaattttcactgagctagttaataagtgactttttattgtctaaaaaattcttaagtgtatcatagagagaaagattattgggtcactaagtggctttctatatatatacctttgtccatatttaatttttgcaaaactcaaattaaggtggtaaacttagtgtggatatacattcatgtattgtattgataagattaactacgttttaaaactaaagtggaaagttttaaacaaaattgtcattcaactatatatgtatttctgtaaaacacacacgtaatgatgaattcgaattaataagcaaaaaaggagaggatttgtaatttaaaattgatcttggaatatacactctacacttaagacagagaaaaaactttttctttccctttagcataatctgcccagctagcggtggtttcttatcagaatgctctcacttaataccttgataacttttagtgctttgtgctgatagcatcaagtttttaaattattttaaaaacaaacaacaacaaaaaaccatttgcttctgaaacacctaaagtttcttataattgttaccttctttatgtttattttcaaatgttttattgtcactctggttattgagatatcaaagttataacaattgctcactctcaggtacctatgcacttaagtgaccagtttctctgaaaattcttttttgttgttgccttcttccaacctcataccctgaattcagaatactaacactgtcaagctatttttcacgcccccaaatctttgttttttctcactagacagccactacccatttggccactaggtggcgcaaaaggcttaatttttcaccttcctccgcctactgtgaaggaagctaaaagtaattagatgtgtttggcatgatttttatattttaaattaacgctgtactatcaaaagaactacctgtgtctcaaacccacaatgtggtaaaagctgacaaataaaaaacagtagctcaattttctagattaattttgtccaggttaaaaatattattgatatatgttttagtgaccacataggtttcagtaagggtaaaaggatgctcttgttcgtactccaagtctggcatggtgactgtcaatacattcattttgaagaagattttgcttctgggtttagccctaaaacaggccaaatagagacgataaaatgagtggaactgaattagagcatttctgaaaagttttatttggttaattctgccccttaaggtcagaaattgtgtaggaaaagtgtttcaaaattataaataaggcaaaattgtacgtgcttgattattttatatcacacttgaacctttgctcataattctgcctgatcaaaaccagagtgtttcagggattgtaatttgcctaagacgaacccggccagccctgtgcgattagaggttaatcagcagagagctgataagggatgctggctttctctttttctccggtaaagaagataacaccaaggttatgattttattgccctctagcacgttagccattttgaatctctagcctagaaattatttcctcacagagagatacagctctgtttttcaaatactctttggatcaaggctcttgtattcttgctggttccctctttgagtttgataaaactttgaaaagtctaccaaagaaatttctctcagaactagactttagagaggaaatgctggaactacggatgagaggcacatgtatgtacagggtcagaccacgcagagagcaggtctgatgagccacaccactgctgctgccccatggcttctagacgctgctgttggttctgttgttaggacctggaggttgctgcagccaccactgaagacacctcctaaaccacttctgtttcaggaacttcacttaaaaaaaaaaaaaaaaaaggaaaaaacccaccgcttccccaaaagacagttgcttcttctgtcacctttgccagagaaataaatacagtaaaaggtgctctgcaacccccacaccctggttcctcctgtggcccctttgtaactgaagtcttaggtggatgaatttaattggtggaacttaggtgctctagcttcaaagaaggctaggggaagtgagctttctggtttccactttagggaggcaggactcaaaaggtaggggaaatttcacagtactctaaaggtgttcaaatcccatgggcagccagtaaacatcacaggtgtgaggtgctgggtggagtggctgccgtgaatatgtgttttggttcatggactacatcagtggctcttaaagtccagtaattcacagattcatgagagataataaaatgattatttttgttttaagccattaagtttggagttggtgtgctgcccagcaatagataatggaaacatacagtatgtatttctgcaagtctggcttcttcacttaatattgtttctatgagattcgtccatgttgttacattttcagtagttgatgaagtttcattgtttacatagtactgtgttgcacgaatagactacgttttgtttatccatttactgttgaagaaccattttgttaaacaatttgagagtaatctgtggaaattatgccacttgacccctaaatattttgtcatgtataatttaagaataaggacatttctcctgcaaaaccctaatactgtcatcacccccaagatacttaaaattgataccatattatcaaacacacaatccatattaaaaaatcccctattgtcccagtaacaccttatagtaaatgtctgttattttaagcgggtgtcattcattacatggcaataggtaactaatacggtgagtctgcttcttccagcaaggaccctcagggggtgcggtgattcatagttctcactcagacttctctgtgtctgctcatatgtccctatttcatatctcagggtccggtctatcccaaccaggggtcttgccttatcacaacagctgctgttggatgatgcaacaaacatttctacaacttcataacctttatcataagcccccgggcttgaccctcagccatatctgtgctgggttgcaggagaaaagatagcctttaaaactgctatagaggcatttacagtttttcattcatgtcttgagtttggattaaaggcttttaatttgtctttttttcctttgtatgctcttgagggcagtctgacgcagccagtctctgaaggttggcacaaaagcctccatcgagtcacccagcttttgcctggtacctatcctaacctaaaaccttgccacatgttaccttggcgaaaggccagtgccacacttcagtgatgattcggctgtcctacttggttagaaccgagttcacttccttcctcaacactcctgccacattgatctggaagtttcaccttgagccaagtgatagttaattttatgtgttaacttggctaggctatggtttctagacatttgaataccagtctagatattgcagtgaaggtattttttagatgagatttacatttaaatcaatagattttgggtaaagcagattaccctccataatgtaagtggcccttccaatcagttgaaggtcttaggggcaaagactgaggtcctccaaggaagagggaattctgcctctggaccaccttcagactcaagccgcaacatcagctcttcctgggtctccagcctacctgcagatttcgaccgtgccagctcccacagtagtatgagccaattacttaaaataaatctctctctgccaacatcctattggttctgcttctctggagaatcccgactcatacaagccactttctatagaaggctgtttcttcgagaaatccaccctcttctatgtcaacagagtttagaatctccatactttatctcttcatttttgagaacataaattctgtattacacatacttatactatactatatatgaaactttcataaacattgctgggcaaagttgaatattgctgaaccaatttccgatgcttctgaataagttcaatggagttaaaacatttttcttcttacatggtatgtccagtgccccagagccagcagagttaagaacttggtaaggaagaccaaagataatccatatattctagtttgttatataatataaaacatgtttattagattctaaaagacataaaaagaaaataatacatatgtatcagtgagagaggtgcaaattaggaagagaactaaggattattcttaattcctgccttcctttctaaatcccaatcctcaattgaactctttaattatatttcctgtttattttattgaatggaaaaaatggaaaattatctaacatttgtcatggaaatataggagaaattactctcagagatatgatgttatttaagtcattgacatattgttaacctcagatgcaaatggtggaattaataatattcctcagttcatggtacatagtcactgttggtctagtgctagtttgtagttgtatttgtattttttattttttagaaatacggtcttcctttgtcacccaggctggagtgcagtggtgtgatcacagctcacagtaagctcaaactcctgggctcaagcaatcttcctgccttggcctcccaagtaggtaggactacaggtgcatgccaccatgccagctaattaaaatgttttaaatttatttttggtaaatggggtcttgttatgttgcccatagtttttagtgctatgataagctagtaattatagtgaacattcttgtcttggatacccaaggtttttccgttatgtatactagtggttacagattttttggattataacctttgccaaaataggaaagttttgattcctgcttccttaactgtttttcaaaaatcacaaatggatatactttaccaaatgtcttttattaatagactgagcaaaggaaatgacttttctatgaatatggtaaattatagcaacaatatgttttattatattgaaccaccctagtattccaaggattccctatttgatcttgatgtatcattattagcataatcattattattattgttattattatacatatttttagagacagggccttgctctgttgcacaggccgaaatgcagtggtgcaatcatagcttactgcagcctcaaactcctgggctcaaatgatcttcctgcctcagcctccctagtagctgagactacaggtgctcaccatcacacctggctaattttttaattttttgtagagacaggatctcacaggatctcagtatgttgacaatgctggtcttgaactcctggcctcaggcgatcctcccacctcggcctcccagtattattatttgtaatattgttgaattcggttcataaataattatttttttctcccatctgtgttcaaggtgaaatgggtctattatttttttttccttgagttttccacaactcaatttggagtcaagattacactcggctgataaaattagctaatcaggtttagtttttttctgttttctggaaaaagtatataatatagaagtttcatgttccttgaatgtttgatagaactcatctgtgaaaccatctgggcattttcaaaaatatatttttttattagatgccattgataactttaaaaattgctttaatactcattggtatagtcaagttttgtatttctttttgtgctaattttgatagattaaatgtttctaggaatttgcttatctcacctaggttttcaaatttattagcatatacttgttcataacactctatgctttatatctgtgtcatatctgtagctgttccccctttttcattatgtatttgtttattcattttttctccctttatccataatcggccttgttgtaactctgaatatcttacaaatatttttaagtaagcagcttttggaatcaaaagtatgttaattttcactacctagttttttgttctctatttctgtttcattgctttctattcttatctttataactccttttcttcgtatttctttaggtttgctcaacttctctttttccaaatttttgagtagaatttctaggtcctttattttaacttttcttgttctaataaatgtatttgaaattataatattattttatatgtatattttatgtgtaacatttttaacacctggttctaaaagagttaattttctttataactgctgtttatttatttgacacagggtcccactctattgctgaggctggagtgcagtgacgcaatcatgcctcactgcagcctccatcttctggactccagcgatgctcccatccacgactgccttttaaatccatgttactgataaatatatttgttcacttacaattttaagtatattttagttatcaagttctaattttattacagtatggttgcagaatatagtttctttctttctttttctttttttttttttttttttaagacagtgtcttactctgttgcccaggctggagggcagtggcacaatctcagctcactgcaacctctgcctcctgggttcaagcgatcctcccgtctagccttctgactagttgggattacaggtgcaccccatccagctaaattttttgtagagacggggttttgccatgttgcccaggctggtctcaaactcctgggctctagggatctgcccaccttgacctcccaaaatgttgggattacaggcatgagccactgctcctggcctagaatatagatagtttctaagataccgatactctggaatttattggcgttacctttatggaatgatgcatgtcctatttgagtaaatgttctgtgtggcttgaactattatatataatttttggttttctggcaacttttaaaaaatgaattttatgaatcttgtacctcattttatttccttctttgctttcactatcctatggcctggagccaattattttttatccatttatagttggctgataaatatgtgtcctgttaaaccggctctctgaagaaaaacaatgcttctgacttgtagcattgctgatttctatagtataaatacttccatagtggtcaatatcaagttaccaatagttaacaactgtcttcaaaaatcctgaatactttgcagtctgctcttgctagccagtataagacagcgcaccacttttttttttttttaagatattcacgttgtccattagtttccattagtttcactccttggcttcacttacttttcttaaccatattttctctctgacccagtgttgttttcttcttttaaaaattgttttaaattatctctgtaagctgctacaaaccttttattggaatgaagggcattagaacagttatttggccaatacagaaaaatgaagtcttctaattttttttttttttttttttttgagatggaatttctctcttgtcgtccaggtggagtgcaatggcgcaatcttggctcactgccacctttgcctcccgggttcaagcgattctccctgcctcagcctcccgagtagctgggattacaggcaccatgcccagctaatttttgtattttaagtagagatgaggtttcaccatgttggccagactggtcacgaactcctgacctcaggtgaaccacccgccttggcctcccaaagtgctggaattacaggcacgagccaccgcgcctggccgaagtcttccaattttaaaagatctaatcttcattcagttctcaaagtctttgctgtgcccttaaggcatgtcacacgcatgtgcagctcaggggtaacctggtactcctgagggttcagactcagaattagggaatttccgcctgtactctcagtttggagattcccctacacattcctgcccgcaggggccctttttcttcattcctctggccagaaagccggtatttctcttgttaactcagggcttgtgctaccacgcagtgcagctctgcacctgaggcctgacgtcagggcagagctgggaggaaaaaaggggaaaacattgaaaacccactccccaggaggggcccctctcccagttttgaccctcttcacaatccacctgcttttgtttactttttggagtccttgagtacttgctttttgtatactgcccagaatttctacttgtgatcagtgggaaaaatgggctatttaaaatctcaaataagttaaatatcatggctagaaacaactccaggcatttgtaattttagatttttttctttacactccagggggatgtgattgttttagagttttgaattcgtatgtttagcctgagatcctactagtatttctgttgaatatgcctgttgactgcccacttgttagcaaaatggcattgaatgttggaactgtaaactaccttagaaatcattcagcaccatcttttgacagaaaaggatatgagagttcactcctgtcactcaggaagtgcaaggcaaagatagaagcagaattaaatttgttttaatacagttactcagccatctggtaacagtttcctaagtgccaacgaatgtatggggctatttattgcagattttaagatgatatatggggattgagggaatgagaagttttagggagtggtagaggaagggcatataataagactgaatcccagatcccagcctcagaacttattttgtgaccttggtcaagtgatttaatctttccaaacctctatgtgtcctatagaagtaataataatacctatatagggttgggtgttttttttgtttgttttttctttttcttttcttttttttttcttaagatagggtctttctctgtcacccacgctagagtgcagtggcgcaatcacagctcactgtagcctcaaactcccaggcctaagcgatcctcccactcagcctcccaggcagctgggactacaggcatgcaccaccgcacccgactaatttttaaatttttttgtagagatggggttctcactatgttgcccaggctggtcactaactcctgggctcaagcaatcctcccgccttgacctcccaaagtgctgggattacaggtgtgaatacagggggttttttggtttgaattttaagagataaaatttataaaacatttagccaatgccacaaatgtagcttcttttggttattgtcattattctttgaaattcacaagtgccccaaaatatttaagcatttttcatgtattgccctttaatatgaatgaatgcattatgaaaggaattcttttacatgcgagtttgctgatagtcttagctaattctcatgtgtgtaggtgtcttgcctatctgtcagtcttagccttaaaggaaagagtcccatcacctcacttgcggcctcatcatcatggaccgcatgatgatgcggaatgagaatttttattgtttgtactacttcaaaatcattcagtacgtgatcacctgtcatgtatagggctctttatatttctagtttagtcccttttgttttctctaggaaagatgttttagacctgggacaaaagaagaaagagtgtatgctgacatctaggagggaagcacccacctcccctaagctccatctccctgagcactcatttcccaatgaccataccaggttttggccctagagagtttattacaaaataagaaagagaagtctggggaaggttcactcatcatagaattttggcagttcattgcccaagatgactcgatggtccacaccggcagctgtaatagtgaccaggtagatgacacccccgcttgagccatcccggctcatggccagagcaatagctgcagagggtttcaagttggagagagggagagagaggatggcttagcttcaaaaatctttttactccccctccatccatatgcctactaccactttcacctcaaaactcatcttccaggaaggcatatttagtggtgtgctggtaaatcagtttttttacaaaaaggcttccatatgtggcatctgctgatgtccgtggtgtaaatgctcccgctatgatgaattgcaagttacaaatagctaagcagttcacaaatccttgactatttaacagtccgctctcatgagtggtcccaagccagcctcagcacacctcagcacaccactggttctttttttttttttttttctccagacagggtctctctctgtcacctaggctgcagcgcagtggtgcaatcaccgctcactacagccttgatctccccggctcagatgatctttccacctcagcctcctgagtagctgggactacaggtgtgcaccactatgcccagttcatttttttttttacttttttttattgttttttgtggagacagggtttcaccatcttgcctaggctggcctcaaactcctgggctcaagtaatcctcctgcctcagcctcccaaattgttggcattacaggtgtgagccactgtgcttagcacaccactggttctcacagtgactgtgtatcctcatttgatttactcagaacagccctggtttatccgtattgcccaagaaccccattgagctttgcatttgtcctgccccttttcactcttaaaagtgtaccaggcccggcattaacttaaatggccacccctgtatttctcttcctgttcctcataatctacttccttcccatgtttcaaagccctccccaggtacccttccacttggctggttaccgtctgtggtgaagcgcctgcactcctcgggagacatgcctggcttatatgctgcatccacataaccatagataaaggtgctgccggagccaccaatggcaaaaggctgtcgagtcagcattcctcccagggttccatatacctgggaaagggatcctcaggttaaagaatcatcaagcccttccttcccactgagacattaagtggtctctgcaccctgcaatgaagccctggtatctcatatccccaaagtactatgctttcagaggtagtgtccttggaactcattgctagaatgacataggacttccatcttcctctgcaggagagtggggaagcccagaggagagagtgctttgggagaaactcacctgacctccttcacgttggtcccagccagctaccatgagatgtgcagacaagtcctctcgatatttatagctgatatttctcaccacatttgcagcagccaaaacaagtggaggttcctccagttctatcctgagggaaatattaggaataaaggttgatagaattttaagtctcattctcctatactgttaccatcatccctgctaaacgacccctgaaaactgtaactgcaatagctcaaactgcagcctccctcccacatgtacaggggaaccagagtcccacaccaccaactggtaagaagctttcaattgctcactcttttgctcagccccacccacataactttcttttggctgcaaggaccctgctcttatggggaaaagcagataaggttacttccgtcccaacgaccttgatttctcgtatggtaactgcctgatattatggtgggtcacaatatcaccttcttcctgattatttatatcaggatagtgatttacagcttttaaactgtgttcacatatagaatgtggttctcaaaataaccgtctcatgaggtactatattatctccactttacagatgcagaaactgacagattcaagtgccagcaagagccgaaacaagacttttccatttcccagtgtccagctcctggaacagcacactgtacagggattcatgcaggttgggggagctctagtgggtggggagtcagaactccagagcttcatacccatggagctccagctggtaggcggccatgtcggccacggcttgggcatcagcagctgaaccagagagtgcacagtagatgcgctcgtgcagcggggacagcttgtcaaacactcggttcaccaccgcctcgctgtcaggagggagtcaacagtcaccaagttaaaactcaggttttttttttttttttttttttttgagacagtctcactctgtcacccaggctggagtgcagtggatcaatcttgggctcactgcaaacttcgcctccctggttcaagtgattctcctgcctcagcctcccgaatagctgggattacaggcacccaccaccaagcccagctaatgtttgtattttcagtagagacaaggtcccaacatgttggccaggctggtctcaaactcctgacctcaaatatctgcccacctcggcatcccaaagtgctgagattatagatgtgagccactgcacccaaccagaactcaggaatttttgagggtgatcattcaatgtctctcaaatttctttgacaagagaatagcatgaagtttaatgcttggattaaagcaggaggcaaataatcatctcagatattattaatcactgcagatgttaatcaaaattaggcttatttttcaggcttagattttataacaaagcaaaaaatgctaaggtaagaaaaatatgcctcatcaattttctttgctattaacaatcttgagagagttatgttctatggaacataatgtcagtaatattgacctaaccccatatactcattttgcatgtgaggaaattggttaggagtgggagaagagacaaaatagttcaatatatggtaaatgagaaaccaggtatctgcttgacagaatcatctttttgatccctaagcacagatggaaagaagaccctcaaaaatctatctcctgtccccctctcagaccctattcctttactcatccctgtacactactgggacaggtcacatacacattcagaccccagatcctcctccacaaattcagagacccaagcacccaccaaatagcttatcatagtggcttttggggaaggtcaactccattcctccaaggctccagtttgccagtcttttcatgaatgggtaaggaaagtgtgtatttgaggccattagcttctttccaaatgcatacatcttcacttttactcaccctgcagacactcgggaatcagaacccatcacaacgcccccgtcaaactccactgccatgatggtggtctgcagagacacagaatatggaatgtcagggcaagaacagccttgatgccctcatgttagagaagaagaaacattcccagagaggcgaagtgactggctcaaagattacacagtaacaggccagagctgactgtcagtacaggctttttttcccttcatctttccactttctctattgcttcatccggctgcaggggaatgccacagcccagctgtgatacaacacagaaagaactgtgtccctaagttccaacttgcctagtggaatcctctccactgtagagaggtggagatgaggctcctacaggtagaagtgaagcagctccgcaagtgaaaattatctccaacggaagggctcatagtatgtgcagatgtggtgtagacccaacacagagtaattgactatgatcttgggaaacaaggtcagtctatttttttttttttggtccacaatcctccactctcaccccccatttcatcagaagtgagctcttccaatttactgaacattggaaaaaatcgaggagggcagtggttagcatggccaggggcaaggcaggagagaagcagcaaggaacacatacagatggttgaaaataaaagtttcagttatggaatttccgatcaagaggtaaatacatatctcagcagccagggaggtaaatttgtaccaagagataatttgactgagaagtttaagctgacttttccaggtcaagaaaagaatcaagaagaagtgagggaagataaagctacatttattctactattgagttggaaggagccttaaagatcctcggttcaaatgaggaaaccaagtcacagaaaatgcaaacgacttatgcaaagtcacacagagttaatagtagacctgggactaaaattcaggtctaactcttatcccttgtttccacttctacttcctacttgccactgctcatttggcagtgaggggagatttcccaaattataagtggtttcactgtgtctttcttaccaggccgtaagttactctggccccaaaggacgctcctctgagtatgctttccgacggaccgacttatcatgaatagagggtcaaagaacagggttaacttcaagttagaggctattcctctctaacaaagccgcccccaagccacgagtggtggcagtagtccagagcagaagccagccagccagtcttggggctgccatctgccccaggcgcccatcctaagcaaagtccccccagtgggcacatgggagtgggcagggaagacacagggaagggagtaaggcagcatctgggccaaggagaggccttcctgggtcaagctagggaagggcatcactagttaacacagaacgcccattatcagtgcttgggctaagagttgcccagtggcaagtttatcaaaagtctgtgtgatgagttggtccttctcaataagtgcctatatttccttctcccaagtgctgttctacttcacccagggcaccatttcctcatctctttgcaccatccccaaccccctttcttgatttaaccagcccccactgtccgggaccagagtgaaagcgaaagcgctttagagtagcttcccgttgacgcttccagctaagagtcaaagcacccgctttttccaccagcctcgcgtgcctgttcccttcacggacactctagacgacccccctcagaaaagaaatactctatgctcattgcgggttgcaagcgctggctgctacaggcgacctccctgcgctcccgttggtctctgcattcacttctccgcgcgcgcttccagggtcccctggccgctgcatctcctccacccctctgccaaccctcaagcccagacccattaccccggtgtggacttctcccgcccggggtaagtccccggttggtgctcccgcccgcagcatccctgcaaggcaccgctctcctcgccgcctggggcactggtttccaacctgggacagcgcacaacgcgcagccgacagccccgccccttcgcggcgccgccaggaggcgcctgggtgctgcggggctgctttgcgcgcggcgctaacgtgtgtagggcagatctgccccgagacaagtgacgaggcagccccgccctgaggctggggtgggaaaactggtgcaagtggaaaggcaggaggcagggagaggcgagaagggtgtgcgtgatggagaaaattgggcaccagggctgctcccgagattctcagatctgatttccacgcttgctaccaaaatagtctgggcaggccacttttggaagtaggcgttatctagtgagcaggcggccgctttcgatttcgctttcccctaaatggctgagcttctcgccagcgcaggatcagcctgttcctgggactttccgagagccccgccctcgttccctcccccagccgccagtaggggaggactcggcggtacccggagcttcaggccccaccggggcgcggagagtcccaggcccggccgggaccgggacggcgtccgagtgccaatggctagctctaggtgtcccgctccccgcgggtgccgctgcctccccggagcttctctcgcatggctggggacagtactgctacttctcgccgactgggtgctgctccggaccgcgctgccccgcatattctccctgctggtgcccaccgcgctgccactgctccgggtctgggcggtgggcctgagccgctgggccgtgctctggctgggggcctgcggggtcctcagggcaacggttggctccaagagcgaaaacgcaggtgcccagggctggctggctgctttgaagccattagctgcggcactgggcttggccctgccgggacttgccttgttccgagagctgatctcatggggagcccccgggtccgcggatagcaccaggctactgcactggggaagtcaccctaccgccttcgttgtcagttatgcagcggcactgcccgcagcagccctgtggcacaaactcgggagcctctgggtgcccggcggtcagggcggctctggaaaccctgtgcgtcggcttctaggctgcctgggctcggagacgcgccgcctctcgctgttcctggtcctggtggtcctctcctctcttggtaaggggaacgcagggcaagaggggaggacacaaggggactgggacaggaatcaaaggtaattgtcagtaaggtagagtagcgtgggttctgggaaatgtggagcgggagaaggactcctagcgtgggtcttggaacaccacttcggtgtagaagaaacggcactggactggcgggggccagaggttctgggctccattgctgaccgggtcttgattctttgggccacgccggaagcggggaaatcctttgctctggggccgaagggcggggcatcctcatctctaacaggaggcttttctacttcatgatctccagccttcctaataaaatcctgaaagttctggtagagcaaccacagggtagtgagttccagggcagcctatttaggttcgggattgagacgtcagtgtttcctttctgctgatgccctccaggataatggtgagggggaggaggcgtggtggggccagtctgactggaactgacctacttagacttaatatttgtgcgtgacctctcttctctttctccaggggagatggccattccattctttacgggccgcctcactgactggattctacaagatggctcagccgataccttcactcgaaacttaactctcatgtccattctcaccatagccaggtctgggggctgaaaatggggcaccctgcaaatgagggagttggaagttggggctgctgtccgaaatgcacttatatggggatacctgggaccttcagtctgttccctgaacacaccctgatcccctttttttccgggttctttatagtgcagtgctggagttcgtgggtgacgggatctataacaacaccatgggccacgtgcacagccacttgcagggagaggtgtttggggctgtcctgcgccaggagacggagtttttccaacagaaccagacaggtttctcctgaaactctttcattatacgccatgtactgttcatatcctcatacatctgctttgatctcccccctccccgctctctctctctcacacacacatacacacattgttccttctcattcttgatataccctctccctgtctctctctctctgtctctgtctctctctctctctctctcacacacacacacacacaattgtttttctcattcttgatatacctcaggagcaaaatattgtcctccttaccttaagaaaaacctagagttttcatctagcattttcttataaatctattcctatgtatccttagatagaaaccatagaatttcaaacctggaaattttgagctcatagagaccaactgcctcatctgacagagaaggaaactgaggccaagaccctaaatgctgaaactgcacagttacatatggctagagacacacttggggttagaaccctggtctcttgagtgctccacagacttcggcatgctttctagcagcactagaagctgtacagttacatatggctagagatagacctggggttagaaccctagtcccagtgagtgctccacagactttggcatgcttcctagcagcaccctcctcctccatctctgttatgtgaccagtttaagctcttcctgcctgtgtgtatagcatgggacatacaggttctctagggaacagaaagctttcaggaaaatggaaattcacatgtgcattaatgactttataattaaaatgaaggtcaggcctttcctctttaacactcatcttccctgcactgagatttgcagacctctggagaaccctaaccttgtttcctgcagcctccttagaaccccatgttgacacccctgaccctggcatcctggctcattgttagttcgtctcatcacttggaacctgtctgattcacctcactctcttctccccaaccctgcaggtaacatcatgtctcgggtaacagaggacacgtccaccctgagtgattctctgagtgagaatctgagcttatttctgtggtacctggtgcgaggcctatgtctcttggggatcatgctctggggatcagtgtccctcaccatggtcaccctgatcaccctgcctctgcttttccttctgcccaagaaggtgggaaaatggtaccaggtatgttcatggagttggcccgctctacacagaccctcatctcccagacttggcagactcagttcctctcacattgctttcagtccagctttcctggcacccttactgattctccatcttcatggaacaccctgtccctgtggtccatgttcccaggttgctcaacattaacctccatactctctgggtcttcttttctagcttctccccacaatctgtctttaagaatttgatccccaacccgttctgagtcattttcctcttcctcgtatttctttagcatccaaggggcatagctgtgtctctttctcttttctccttttcctctgtctcttctcacctttaatttccaaataggtaactcaggtattagtgtccctgatggtttgccaacccgtgtgacatctcttgtccatgtatccacagttgctggaagtgcaggtgcgggaatctctggcaaagtccagccaggtggccattgaggctctgtcggccatgcctacagttcgaagctttgccaacgaggagggcgaagcccagaagtttagggaaaagctgcaagaaataaagacactcaaccagaaggaggctgtggcctatgcagtcaactcctggaccactagtgtgagcacctgaagatgaatacccattcccttgtccttaagatgccgtgactccattcccattcctatgaccctgctcccactccttctttactgggaaatggttggttcagtattttcgtcctagcaacctgaggctcaatgactctactcagtgtccctagccccctccctctctttaaagatgctaggtggcttcctttcagtatggtacataaaatccacccaaccatgtggattggagagatgcgtgtcttccagtcctagggccttcctttgcctctcaggggaagtgcagggcgccataaattcttgcacctgggactgcttcatgctggtaccttgtagatttgttagtgagagtgatgggaatagtggaagccagggatgagggacatctgtgatgcactggaaagagagctacgccagtgatccgaagatcctggcttgatgatgcaatttacttgtcttgtgatcatgacaacaaatttaccttctctgagactgtttcctctttatttatttatttgtttgtttgtttgtttatttttacttattattattatttttgagctggagtctcgctttgtcgcccaggctggagtgcagtggcgcgatctgggctcactgcaagctccgcctcccgggttcacgccgttctcccgcctcagcctcctgagtagctgggactacaggcacccgccaccacgcccggctaattttttttttttttttgtatttttagtagagacgaggtttctccgtgttagccaggatggtctcaatctcctgaccttgtgatccgcccacttcggcctcccaaagtgctggaattgcaggcatgagccactgcgcccgactggttgtttcctcatttttcaaaaatggagtgatataaccttctttataaggctcttcatgtattagctgacatcacatgaatgaaagccttttgtgaagagtaaaatgctccccagacaaggtgatagtggtgatggtggtgaagataactgtgacttgcatgatgtgcattgagtcagactccatggggtctctggttcattctcctgtctgcctattgagcctgccgatgtcacttaggagacagggacttgatatttccttcaggttaatgactgtggttctttgtgtcccctccagatttctctacctcagtccctttttttgtggtctctttatagatttcaggtatgctgctgaaagtgggaatcctctacattggtgggcagctggtgaccagtggggctgtaagcagtgggaaccttgtcacatttgttctctaccagatgcagttcacccaggctgtggaggtgaggtccctccaccttcactccccagtgtgattccttcctctggcccagcaccatctgtgtgatgtccttccattctttacccttcttgcttcacataatgctggcaagcagactacctcactttcactattcttacctccctctaggtactgctctccatctaccccagagtacagaaggctgtgggctcctcagagaaaatatttgagtacctggaccgcacccctcgctgcccacccagtggtctgttgactcccttacacttggagggccttgtccagttccaagatgtctcctttgcctacccaaaccgcccagatgtcttagtgctacaggtacaacctaccactccctgtattccactggccccaactgcaattctgccatcctaaattttcttcctgccttcagcctgcttactgccaagcatatatcctccctaaccctttaaaggcaatggtaggcatcatctgttccataaatcttccccaaactcaagaacccagtttgggcttccaaagagaatgagagaagaggtttcgaagagagtgctctcacgttccaaggaattgctgcagcaaaatctgtgtcttcggtcttccatctttccttttcctttgtaatttggaatgtgatttttccctttcctggtggtatctgacatcaagtgtgtggcatagtggtgctgggtctctgcccttgtctttgccgcttcttctatctctactccttggggaggcatcacccagaaatctgtgcatgtgggagggtaggagtttctatatttccctgtttttcttctggggtaagacatcatgctatgtaacaaggcaatgacactctcaaggttagaggccttggtagcctcttatcgtgtgcttctctggcctctaggggctgacattcaccctacgccctggcgaggtgacggcgctggtgggacccaatgggtctgggaagagcacagtggctgccctgctgcagaatctgtaccagcccaccgggggacagctgctgttggatgggaagccccttccccaatatgagcaccgctacctgcacaggcaggtatggaagcaggtggcttgaaggagggcagggagcatcaaatacgaagagcattcttactgagcactctgaaagaggggttagggaatgataagagaccttgggtggagatggtggtgtagtcaggagggaggtagtatgattttgtgacatgttctcaataaagattttgagtcttcgatctctagataaccatactcccatgtgccttgttctatgactcttcatcatatttcatctcaggtggctgcagtgggacaagagccacaggtatttggaagaagtcttcaagaaaatattgcctatggcctgacccagaagccaactatggaggaaatcacagctgctgcagtaaagtctggggcccatagtttcatctctggactccctcagggctatgacacaggtactctctccactcatctcaccacccagccatctttacctttgctgaaaccccagtagtcttgcctttatccttcagttcctccttactcatggacatcaatttgaagttgtaagatcatgctcctatggcttcttcatcctgacatcctcaggattctgttcatcttcccagaatctcccctatccagctacaaccgtcagatcttggtgtgtgtgagtgcgtgaatgcatgagtgtgtctgtgtgcatgtacatgcgtgcacacatgtggctataccgttctcatcttggccctttgctctgcagaggtagacgaggctgggagccagctgtcagggggtcagcgacaggcagtggcgttggcccgagcattgatccggaaaccgtgtgtacttatcctggatgatgccaccagtgccctggatgcaaacagccagttacaggtgaggcagtcatcttcttaatggctatatcccacccaatcttgcttcttttatacatcttctgttagttttactaacatcataattatacaaaccagtccttgcagttctcagttcccaaatccagttccattggatgcctccccaaggagtagagatagaagacgaggcaaagacacctagaatcagttaaaagagactatctacaaactacagactgaatttctttctttctttccttttttttttttaagacagtgtctcactcagttgcccaggctggagcgcagtggcacaatcttggctcactgcagcttcaacctgctgggctcaagcgattctcccctcagcctcccgagtagctgggactacaggtgtacaccactatgcctggttgacttttatatttttagtagagatgggtttcaccatgttgcccaggctggccttgaattcctgagctcaggtaatctgcccccctcagcctcccaaagggctggggttataggtgtgagccactgcgcccagtcctatagactgaatttctaaagcgaaacataaggaaaagaccatcctcataatatcgtttatttaaaaaaattattttttgtacagacagcgtcccgctatgttgcccaggctggccttgaactcctgggcccaagtgatcctccctccttgacctcccaaagtgctaggattataggcatgagccaccgggcccagcccatcctaatcatattaatattaattaagctagtctgtttacatgcactgtcactcatttattcattaggaatccttctgagctaggcatttatcatcattctacagatgacaaaatggaggttaaaagaggttgaataagctgctcatatagaggtcatatagcttttgagtggcgcagccttgacccaaattcaggtctgcctgacttgaatgctcatctctttactactaagttatatttccttaaaatcgaatataaaaatgccaagtccatgggtagagaagaggactattcaatagtctttattcttctgtcacgtgtttcaccctagggttctcatttttatcctacttttgcacccttcatgtaaaacagtccttaatgaaacaaagggtttgcggagaagtactcagaatgggaaacgttggtgtccttggggttgttagcagagccagcagtgatcctgtgaggtcagtcccagccctggaaacacaggtgtctccctgggctgagggtagtccccggctctgacggtccgatgtctttcctcaggtggagcagctcctgtacgaaagccctgagcggtactcccgctcagtgcttctcatcacccagcacctcagcctggtggagcaggctgaccacatcctctttctggaaggaggcgctatccgggaggggggaacccaccagcagctcatggagaaaaaggggtgctactgggccatggtgcaggctcctgcagatgctccagaatgaaagccttctcagacctgcgcactccatctccctcccttttcttctctctgtggtggagaaccacagctgcagagtaggcagctgcctccaggatgagttacttgaaatttgccttgagtgtgttacctcctttccaagctcctcgtgataatgcagacttcctggagtacaaacacaggatttgtaattccttactgtaacggagtttagagccagggctgatgctttggtgtggccagcactctgaaactgagaaatgttcagaatgtacggaaagatgatcagctattttcaacataactgaaggcatatgctggcccataaacaccctgtaggttcttgatatttataataaaattggtgttttgtactgtggtttcttatgtttccggcacaccaaacggcccactgccttttgcagcgcacttttcagctgcggatgtctcctcttttatcatcctcaatgttttaccccctaactgcatcaccttttcccttaagctttttaattcctatgaggccccttccacttcccctatccccttaggcccacccccaagaatgtgcaagaccccagccacagggcccatcagggcactagcggccgcagctcagagccgtggcctctccgaagtggcagatggggcgggcgcggccagagcaagtgccaggcgggaacagagggactgggcgcgcctcacaactcaccacctcgcccgctggtccttcctggctcgcctggctctgaagctgcacctggaggggaaacctcagaacagtaggcgggattgcctagtaaatatctcccattcagggaggcccaggtcgtgtgacgtcgacagttgctgggtagatgaggccaacacaggttgcaagaagaggcggggtttagaggcgtgaaactccgcagtgctcagccaagcagggagcaacgctaggaagggcgggcagaaagggcacgctcttgtgggtgactacaggttaggagaccgttgaacctggaggggccctaggatggaccccgtggaaagattcagagactgcgccctctccctggcgccgccttcccctacacgcggcgggtatattctgttgcagttggcccaggacctgtttccaagactctgccccctcgcacttccgtccctcctggttttgtaaagtgatgctcataggaacccccaccccgcgtgacactactcccagctcctggctgacttctagtcttctggttgaagctgcgcctttagatgacacgaccctacccacccctgtttccagcggatgcccgggcctggaggtacctcttactgtaacccatcgccaagtgggcttttgaaggcgcctgttcctttctcgctttcttcggaagacccttgacccatcattcccccgacccccataacgggagagcagagaagccggtccccagtgtgatggtcctggtccaggcactaactgtccttttctcggaaaaggcagggggatgtggaaaagagtcttgttccctccccttcgatctgtggctttcgctttcacttcctcctccgagagcggacagatctctgggtgctgggcggtcatggcgctactagatgtatgcggagccccccgagggcagcggccggaatcggctctcccggttgcgggaagcgggcgtcgctcggacccaggacactacagtttctctatgcgatctccagagctcgctttaccccggggaatgcaggtcggggcagtagggaagcccctagggatgcagggaggcgggcgctgaggagtggagggtcgcctgagaggaggaggcgagagcgggagcgcggggtacagggtcgggggtagccttcagtcccggagagcgccagacccaaagaagaggccacatggggatggggcctgagaggaggaagtgcaagttaggacaaagagttacaggtgaggtgggggctcccaaaggaagacaagagaactttcctgcccttgtccacacacaaatggtggagcctttttcatggggttatcacatgatataggaggtgtgtggtgtcttgggaaacctatgaaatttgcctgctggcctcctctcagcaactcactgttgcgcgacttagaacaagtcacttagtctaggtcccaagcccctcttctgtaaagtgaggatactgttactaaacgtgttttgtgagggttgaatgctttatgcatggaagaaaccctttaagtcactctcaaaattttttagtaatggtaacatgtgcttgctttcatttctgttgtgctggaaaatggaaaaggttgatactggcatgcctcttcttttccttctcccaagccatttccttctagagattggttattaactgtttcatttattgatggttagatcatttctgcatatctcctcaccctcatactccctaaaaccttttcctggagcctcttactacagaatttttcattgcctttctcaacctcttttctcttatcagcccacagaattcttccagtccctgggtggggacggagaaaggaacgttcagattgagatggcccatggcaccaccacgctcgccttcaagttccagcatggagtgattgcagcagtggattctcgggcctcagctgggtcctacattagtgagtgtatacgctccagcaggcagaatctggggagctgggctctcctttccacaggaggccaactctgcaacaaagtggaagtggatattgatttaggacacactgggggatctatggggtcatcccttctctcccaaagctccatcttcttccaggtgccttacgggtgaacaaggtgattgagattaacccttacctgcttggcaccatgtctggctgtgcagcagactgtcagtactgggagcgcctgctggccaaggaatgcaggtaagcgaggcctctcatcttcctttcttagcctagtggttaatccctggatctctcagatcattgctccttactcttgtcctatgtggtccatcttagtgctaatagtatatttcacaaaacagctttttggtgataagacccttctcccaaatctcagcctgtgctccactcataagccagatagtacgtcaggtatttagcactgacacatccaccctggcgggacagtatcatttactaggctgcctttgtatgtttcagatactttaaattccaaatctttctctgatctttagatcctacaaaataattcctttccaatgcttatctctttaatcatttcctgccccatcaagttggaaagagctaacctctctttcctcactccaccttgtcctcacccaggctgtactatctgcgaaatggagaacgtatttcagtgtcggcagcctccaagctgctgtccaacatgatgtgccagtaccggggcatgggcctctctatgggcagtatgatctgtggctgggataagaaggtgggtgctctccattcttcatgttcccccaccatgttccctatggatgacagatctgtttcccatcatatactcctactccctccctgacaagatgcatggcatatagagtgcttggttatagaactgtttcagtatatccatggactatttattggcccagatatgaatcattgcatgtgttttgtaagcttgtcccttttgttaaacagttgatttcaagtttgtttttcctttttcatttctaaagttcgatgactttaccaaagtggtttcctaattccaatgttcttgtggtaatattaattcttttgttcactttttatgtctcatatttgaacccccatgttaccaacatcttcctctccaatttcagcctgaaatctttcatcttatagggtcctggactctactacgtggatgaacatgggactcggctctcaggaaatatgttctccacgggtagtgggaacacttatgcctacggggtcatggacagtggctatcggcctaatcttagccctgaagaggcctatgaccttggccgcagggctattgcttatgccactcacagagacagctattctggaggcgttgtcaatagtaagagaccaatgctcccaccaccatgcctgggaggagtcggcgggtggtggggggggtgatttaagattgagaaaccagcctggccaacatggcgaaaccccgtctctactaaaactacaaaaattagccggacgtggtgacgggtgcctgtagtcccagctacttgggaggctgaggcaggagaatcacttgaacctgggaggtggagcttgcagtgagccaagatggcgccactgcattccagtctgggccacagagtgagactccttctcaaaagaaaaaaaagaaaatgattgagagactcaaaggagggagagtagtagggaggaaattttcagagtcagaagaagggcattaaaggcccagtcatatggttttaagcttgcgcatgtgtcttgttgctgccttcaacataacatcagtgacaggaacttgctgaggtgaaaggtgactccatgttcttttctcatttgtccacagtgtaccacatgaaggaagatggttgggtgaaagtagaaagtacagatgtcagtgacctgctgcaccagtaccgggaagccaatcaataatggtggtggtggcagctgggcaggtctcctctgggaggtcttggccgactcagggacctaagccacgttaagtccaaggagaagaagaggcctagcctgagccaaagagagagtacgggctcagcagccagaggaggccggtgaagtgcatcttctgcgtgttctctatttgaacaagcatttcccccagggaagtttctgggtgccccactaagtagaataaagaaaaacggttataaatacctctgtcttgtggctgaatggggttgggcctgtggttgttgggtggggcagaaagtaaagagacgctttttctggagaaggggctcagacccctatctaagaaatgtggcctcaccacatagttcttcctggggtttccttccacactcatctctccaagacctcaggaaggctgctcattgctgtccatggacacttgtttgcaatttcacataggttagggtcctttccatagagaggcacctggggactcctgtgtgttccattgttaatggtttgaggaacagggagtagggcacctaggataactgtttttgactttatagagtaggatgaaaaagcttccacttcactttaatatggtaatcatataaacaccataccatttatcccaaataacactttggagatattggatattgaatataaagacagacattaagggtctaatttcatgatgtgtcatgctgaattgcaagatggcaggactataattttagaggaagaagagatcaggaggactcccctaagtgaggagtgtggggaaaatgtaaaagatccaggttagaagaaagagacacacatcatgagattttcggaatcatgctggaactatggaccatgtcactttccagaaaataaaggaaacaaatgcttgaaagtaggagcatgagcttgagcatggagcttttttcattagagagagattcttaaaatgccagaatgaatagagttgtaaaactttagcgagcccctacttaaaatccctcctccccaccaccactattttaaactttaagtgactccttggtagtcacacaggtaacatttcaaaatggtgatctggaatccaagcgacccttcctttggggaatttgtttgtttgtttgtttttagtttgggaggtggtttcaatctgaagagtcctttctggaataaacgaatctttctgttgcataggaaggctctgggtcaggaaggatatttaaaaacctaattactgttctaaacagtgttaaaatagaacaagaaccaaagctcagtacggggcatttccctcataggctgaaggtgcgcccaacataatttggagtacagactcagaggcacctgaacacgcgccagctcaaggtgctccggctgagaaggacggatgaagatgaacgctcagggcctactaaattcaaagtctgtacgtgaaaatcccctttggcctggtgagattggttggaaccttctatttaggagagcccggctcgctcgcctaaaactggagcttgcatggaagagggcacttttttttttttagacgaagtctcactcttgtcgcccaggctggagtgcaatgacccgatctcggctcactgaaacctctgcctcctgagttcaagcgattcccctgcctcagcctcccgagtagctgggattacaggcgtccgccaccacgccctggctaatttttgtatttttagtagagacagggtttcaccatgttggccaggctggtctcgaacccctgacctcaggcgatccgcccgcctcggcctcccaaagtgctgtgattacaggcgtgagccaccgcgccggaccagaaagaaggcacttcttaatagtaggctcagagcttgaagtagtaactttgagaaaattcagtgattctccaattacaaagcattctccaattacaaagcaaggacaacagataaagttgcccttgagacaactgtattttacttaatgataaagaaacatttttgcagttttatatcccagagtaaccgccactaaaggcgagtgagactcattgcaggcctgtacagtgcgaaccagagttcgggctccagttccgctgtctgcgggtctcgcgcgccccctcccggcggcccagcccagaatgaaggccttggctggggaagcgaaagcgaaagctgcccgagccctgacgcccgccctggccgagcgtagctggcggaccagagccggtagcgaggttgggagagacggagcggacctcagcgctgaagcagaagtccccggagctgcggtctccccgccgcggctggtgagttggtgcggaggggaacctggagcgccaacagggacgcagcccaagtgactacccactccacgctcctgcttcccagtccctctgcacccggcgataggagggagcggagcccggaccacttagctcgccgcggcaggcgggggtgggggtgggggtccggggattttttttttttttttttttaagcacgaggctcctgatggtcatgcttccagctccccagaaggccgaaagctgtctgtcgtaggaggggtgtacggatgagcaccggttactcaggagagctctcagggttgaataggataaaatgagaagccgatggacgggttaggcggagccgggcgggtaggagggcagggacaaggattgggactccacccccatgatttctcatctcgtatccgttgacagagccatgcggctccctgacctgagaccctggacctccctgctgctggtggacgcggctttactgtggctgcttcagggccctctggggactttgcttcctcaagggctgccaggactatggctggaggggaccctgcggctgggagggctgtgggggctgctaaagctaagagggctgctgggatttgtggggacactgctgctcccgctctgtctggccacccccctgactgtctccctgagagccctggtcgcgggggcctcacgtgctcccccagccagagtcgcttcagccccttggagctggctgctggtggggtacggggctgcggggctcagctggtcactgtgggctgttctgagccctcctggagcccaggagaaggagcaggaccaggtgaacaacaaagtcttgatgtggaggctgctgaagctctccaggccggacctgcctctcctcgttgccgccttcttcttccttgtccttgctgttttgggtgagtcaggagaggacgttgtgagttggaggtggtaaaagggcctgggcaccagcacattcttgtgttatttttcatgcctctttcaggtgagacattaatccctcactattctggtcgtgtgattgacatcctgggaggtgattttgacccccatgcctttgccagtgccatcttcttcatgtgcctcttctcctttggcaggtaggtggtgggcagctgggtccatttgctagccccaaatctttataggggtcttcacttccctaactccatttctaggccctttcaggcgcaaaacacaaaaatacttaaactaaaatatggtgaatgtagtcaccattctgtttcatctatccattcatttcttccttcgttcatattcatccaatatcttcaaagtttatctgatcttattataggaacaagttatgagtgaaggtagtacaaaaggaatttaagtctcagatggaatgtctctcagttgtctctcaacattcctaggtccatgaaattccatttctttctgcctcctacctcctacccctaagtctgtctccaaagtatctctccagggtcactctctcaggatgggtatgcttctccctctcactcttctttcccagctcatcttgctaatccctgaagatcttactctgaggcttatcacctttctttccagaatcattactcttttcccttcacttgctttcctttctctttctagacatactcaaacaaacaaactgtttgataaggctgggactgggatgaggtgagcgaggcacctggggtgcaaagtttaaggaggtgtgcactcaccttacccaaatcccagccggcctgattgtctctatttttatggtcatacttaatttagagtaccctcgaaaaccatttcattgtgccttcattccatcctggctgctttctgctgaaactacagtcgtgcactgcataacgatgtttaggtcaatgatgggccacatataagatggtggacccacaagattataataccatatttttactgtaccttttctatgtttagatacacaaatacttacttctgtgttacagtcgcccacagtgttaggtgcagtcatatgttgtacagatttgtagcctaggagcaataggctaaactacatggcctaggtgtgcagtaggctatgacatctaggtttgtgtaagtacactctatgatgttcatacaacgatgaaaccatctaacgacacatttctcagaacacatccctgtcattaaagtacaaaccctcattatatcatgtctgactattccaaacgcctcttcaatatggtaactaaatttgtattagaaacatatattttgtaaaatacatgcttttatgctttatattttttcctctaagtgttactgtagcatgtagttggtctaagagggattttccaactcgaaggatgacagatgggaatcacatgactctggggctccagagaattgtgggggcagggaatttattattgcagttcccatgatgaagtatctatgatgacagagaagggctttgggtatggggcaggaaggagaccaaggcggaggagacgcacagagggacaagcctgagggacgctgggacagaagcaagcactgggatacttgttttcacaatatcttttcccttctattgtagttttctattgtgtctagtacagagtgcactccataaatacttgtaaatttgtacatgttatgattttgttctcacatctagctcaccatgtctcctctttcttcttcctctgtgtattccttacctcttctctctctgtgtgtctgtctctcatttctttctcttttgcccctcctggcatgctttcccctgactttgcgcttctctgcactcctggcttgctcctctgtttcacccgctggcttgctccttctctgcatctccctcccctcttattctcctaccccacagctcactgtctgcaggctgccgaggaggctgcttcacctacaccatgtctcgaatcaacttgcggatccgggagcagcttttctcctccctgctgcgccaggacctcggtttcttccaggagactaagacaggtggggcctggagtccaggtctgagattcccatggacatcccttgcccctcagtgaccttccacccacagcctctcctcctgccttcacccgtatgccaggacctggggatgcttttctcttgtttgggacagggtggagaagcagcctccactgtccctctgcaagtgaaggaggatgttcagaggagggggctgtgtcagagggaacggtcaggagggagtttctgggggccctgcagtacacatggtttcctttttcctcacctgctctgtccttcttaggggagctgaactcacggctgagctcggataccaccctgatgagtaactggcttcctttaaatgccaatgtgctcttgcgaagcctggtgaaagtggtggggctgtatggcttcatgctcagcatatcgcctcgactcaccctcctttctctgctgcacatgcccttcacaatagcagcggagaaggtgtacaacacccgccatcaggtgagcgtgcatgtaagggaaccccaaagggagaataaaactgacaggtgaggaggcttccacatttgtggctagaggatcccctagagagagatgttctcttctcagccattaggggagaaggtatattgtagtatatactacattttgtttgtccagccatccaacaatggatatttgacttcagaagattcatgattctccagaactgtaaacaaaaatgtaaagtgtatgtgaaggtatgggggagggaataggaaggggagatgataggcgatgataacttttcattagcttctcaaaggagtctgtacatcccccgcccccactgcgaagattaaaaatggtttcttagaggcttttaggcagggagattttccctttaaaatcagcagaagaagtctggatgcagcatagggaaaggaggcgtcatcaggaagtcctaagtctgaatgtcagctccaccttctctttttctcttatattgtggtaaaacatacataacataaaatttaccatttcaaccatttgaagtgtacagttcagtgacatttaggaaacccacattgttattgggtagccatcatcaccatccatctccagaacttttttcatcttcctaaaatgaaactctgtacccactaaatagtaactgcctactacccccaacccctggccgctggcaacctccattgtaccttctgtctccatgaattgtgatgactcccggtgcggtacgtaagtggaaccatacagtatttgtctttttgtgactggcatattttacttagcgtaatgtcttcaggcctcatccatattgtagcatgtgttagaatttcctcccttttaaggctgaataatattctgttgtgtgcatatatcacattttgattatccattcatctgtcaatggacatttgcgttgtttccaccttttggctgttgtgaattatgctgctgtggacatgagtgtacacctgtttgaaaccctgcttttggttcttttgggtatatacttagaagtggagctgctggatcatatggcaattctatttaacaatttttgaggaaccatgtattagtccatttttacgctgctgataaagacatacccaagattgggcaatttacaaaagaaagaggtttattggacttacagttccatgtggctgggaagacctcaaatcatggcggaaggtgaaagacacatttcacatggcagcagacaagagaaaagacagcttgtgcaggggaattcccctttttaaaaccattatatctcgtgagacttattcaatatcacaagaacagcatgggaaagacttgccctcatgattcaattacctcctacccagtccctcccacaacacatgggaattcaagatcagatatgggtagggacacagccagatcgtatcaaaccaccatacagttttccatagcggcagcaccattttaaattcccaccagcagtgcataaggtttccaatttctccacatcctcatcaacaccactttctgttgtctttttttttaatagccattctaatggtgattaggtgattaggattatctcattgtggttttgatttgcatttccctaatgattagtaaatattgagcatcttttcgtgtgattttggccacttatgtttctttcttgaaagaatgtctgcaagttctttgcccattttctgatttttttttaagttgtgggagttcactatatgttttgcctattaatttcctatcagatatatgattcacaaatattttcttgtatttcatggttgctttttcactctgttgctagagttctttgatgcacaaacgttttaaattctgatgaagtctgatttatctattttttgttgcctgtgcgtttggtgttatatccaagaaatcactgccaaatctagtggcatgaggcttttcttctacattttcctaggagttttatagtgttagctcttatgtttaggcctctgatccatttggaattacatctccacctttcttaactatctgtggctccttgggaaaactacccttctttcctgattcagacactggggatgggaaaattacctcaaatgaaggttaaaaaaattgcatgtatctcctatactacctaacactgagagctcaataatattttgttcccttgctccttcactcttattccttctggaaagaagagtaaggaagagggagagaaacagtttggtatttttaggtagactagggagcatctcactggctggagtaagatgtgggggcctgctgtctttgcacatcagccctggtgtttgctggccctcttttccaggaagtgcttcgggagatccaggatgcagtggccagggcggggcaggtggtgcgggaagccgttggagggctgcagaccgttcgcagttttggggccgaggagcatgaagtctgtcgctataaagaggcccttgaacaatgtcggcagctgtattggcggagagacctggaacgcgccttgtacctgctcgtaaggagggtaagataccagagtggttgtgaaaggagcccaggaaagggggagggcaagggaagaggaaactacagctggttctagaggcctttgcagctcagtctcatagaggcagagagggggaaagaatgggaagattcccagcctcatctctttcttctcctcttccaggtgctgcacttgggggtgcagatgctgatgctgagctgtgggctgcagcagatgcaggatggggagctcacccagggcagcctgctttcctttatgatctaccaggagagcgtggggagctatgtgcaggtgagcgagaagccaagcctgctctccttttttccctctctttttctttgtggactcctgggccttgggctttatttgttctttttaacaatacaatacaaaaccaaaacccgcaagtaattttgctatggagaattttaaacatatgccaaaaatgagacaaaataatattacaaactcacatgtatacatcctgtgctttaacaatgatcaactcatgcccaatcttgttggatctgtatccccagccacttccccccacccatattattctgaagcaaatccaagatattgtatactttcatctgtaaatatttcagtatgtttcttaaaaatacaaacatctttaaaagtgtataacaacaaagccattatcacaccaaaaaattaacagtagttcttaaaatttatcaaatagtcaattgtcaaatttccacttgtggtatccatgtagtatatgtgtatgagtgtgtttattatactttgcttaaatcaggatccagaaatggtccacatattgtgactggttgatacatcttttaagtctgtctgtctatctatctatccatccatctatccatccatccacccatcaatccatgtatctgtctaaaagtttcccttgcacagtttatttgttgaagaaataggttgtttgtcctgtggagtttcttagggtctggattttgttgactgaatccctgtggtattatatgctcttctgcctctgtacttcctgtctattgatagataaacctagaagcttgtgagattgaggggttttttttggtctttttccagcaacagtactttttaggtggtgatgcattcttcctccaagaggcacacaatgtctggttctctatttgtggcaacatcagccactgatgagcagtacctacatccatgacagaattagggctgcaaaagggagatactctatcattcttcatgtattagctgaagtagtctatgaagggagacttcccctcatctaccatttcattacccggtggtacagtttgatgaggaaaggcagagtgagcatttagatctcttcctacatttaccagttctcaaaaacagctacttcatccagggctttatttaaacattttcctagacacttgataaacatcttttttgtgtagagaactgcgctgggcactctgacggctacaaaggtgagttgggcacagtgcctgcatttaaggagctccccgtctaatcaagcaagacagaactgggcacaagtaataggaagcagtaactgaaaagatctggggctagaggcaatgctgtatggtaggagaagggactgtatatcctttatattgcaaattggaacactggggtattggtgccacttttaaattccgtccaaattgtacatttaaaagtggagaatctcttttgagtatggaggaggagcagtgcagttgtgagtggagtgtgtgaggagttgggagggtggtttctggtagaagtgtgtttaattagccggctctcccattcctgttttccagaccctggtatacatatatggggatatgctcagcaacgtgggagctgcagagaaggttttctcctacatggaccgacagccaaatctgccttcacctggcacgcttgcccccaccactctgcagggggttgtgaaattccaagacgtctcctttgcatatcccaatcgccctgacaggcctgtgctcaaggtgcctgaaagagggaggaaacctggacccttgctctctgctgctaatgcataattggacatcacagcctatagttcatttgcctctgagaacctggtcttgcctctgctaagaagagaaatggagggattttgagggagaaggggcaggcccttaactctttttctggttttctaggggctgacgtttaccctacgtcctggtgaggtgacggcgctggtgggacccaatgggtctgggaagagcacagtggctgccctgctgcagaatctgtaccagcccacagggggacaggtgctgctggatgaaaagcccatctcacagtatgaacactgctacctgcacagccaggtgggtgaggagggagaagacaggggacaggagaggggagcatgtacagagagaggatgggagatccacgggaaggcgcaccaggtgttcattctgagggaggtaggtggggaggacaaaagggcccctgccttgggggtttacacatagtcctctgcccctgtccctgctgcacaggtggtttcagttgggcaggagcctgtgctgttctccggttctgtgaggaacaacattgcttatgggctgcagagctgcgaagatgataaggtgatggcggctgcccaggctgcccacgcagatgacttcatccaggaaatggagcatggaatatacacaggtatcttctacaaattgtaagcttgctccttcagtaaaaaagagaaaatcagacttactcttagtggtgaaggtcgtgtccctgtagcttgatgtttgctgttcctctgccctttcctccattcctacgtctccttccccacacactgaattcttcagcctccctcttgatcaagagtctttgtttgcagagagcaatgcagcagtggtgctccctccatgggcagccccgtcaggtccccaccccatggccctcctcccactgggccctccccgcactgggccctcccacctcccgaggtcctactggaagtacctgctgtgcacttgtccctccttgtgtgttgtctgtgtcacttgtatctgaggaagggaatttctctgatttcctcagatgtaggggagaagggaagccagctggctgcgggacagaaacaacgtctggccattgcccgggcccttgtacgagacccgcgggtcctcatcctggatgaggctactagtgccctagatgtgcagtgcgagcaggccgtgagtaccgtgagagggcaggggacagtggggcctgggaggggcatgctgggaggatcagactgtgcagaattgggcagagggaggacgaaggacctactagtggaaacagtctgtgccttcttggggttggggaatggaatccggtggtgtgagggcagccccagttccctcctgggcttccattcctccagctgtggcagtacagccgggagagaagggcagtccaggcctttatctactgccctttcctaccttcttttatttcacaccttctttaccctaaatcataagagatggtgcccaggtggatgtggtgtccatctcattcctgtctttctgaggcactgtgatcaccccttcagctgcaggactggaattcccgtggggatcgcacagtgctggtgattgctcacaggctgcagacagttcagcgcgcccaccagatcctggtgctccaggagggcaagctgcagaagcttgcccagctctaggagggacaggacctctattcccgcctggtgcagcagcggctgatggactgaggccccagggatactgggccctcttctcaggggcgtctccaggacccagagctgttcctgctttgagtttccctagagctgtgcggccagatagctgttcctgagttgcaggcacgatggagatttggacactgtgtgcttttggtggggtagagaggtggggtggggtggggtgggggctgtctgtgtccaggaaacttaattccctggtgactagagctttgcctggtgatgaggagtattttgtggcataatacatatattttaaaatattttccttcttacatgaactgtatacattcatatagaaaatttagacaatataaaaaagtacaaagaagaaaagtaaaagtacccattgtttcacttcctggagataaccatagttgctattttgctgcctgtcccatcagtcgtttatctgttgtttgagatagaaattaaccaaaaatgacataaatattcatgagattgccttcctatatccttccttgttcctaccagtgtctgctattttgaagaagctagggtctggagggacagagaacagttccctgattaacagtattaatagcgacattggtaacagctaccatttatagagttttaatgggagtaggagctatgctaagtgtttttcatgtattatcgtttttaatcattatccccaaccctatgaggttggttattatccccattttacagatgaggaaactgaagctcaaagaggctcaatgactttcccaaggtggtcgtagtggtggagttggagtttgaacacaggcctgaccctagagtccacaccctgacccaatcaattatattgcatcttgggtccataaaccctaatccataatcccatcaagaaaagctctgctgctcttagctctaaataattcagaatctattctcttctctccagtcccgttgttatagtcttcactcatagacttaagatgatcccatcaccagagaggtttctctaccattagcttccctcttccggccattcttcacaaagtcatttttctaaattctgtgtcacatacgatgatggcatttctggaaattccttcaggtgctctcaagccctgctgcagagatccttttcagagcacacactgttccagcccatctgtctcaccctctcctgttgtatccagctccacgacaaactttctgccttccccaacacctttgtgcctttgcatatggtgttttcttgcccattttctgctcgactcgcccctgattttcaagttcaagacttaactcagggttcaggtcttccaggaggccttacttatgtcgtcagtctggggaactctccatgtgcttctatcactgtgcggttacctctttcacagcccttttaaagttctatcttccctttcccaccttttttgaccttccactagaccatgagcacctgggcggaaagccatatatcttattaagctttatatctgctacctggccgagggctaattcatagtggagaataaatagtcaattgaataaatgaataaatatctccaccatcgtactaatcttaatcctccctgcccactcccaccactgaaaatgcaacattgtacacatcactggttgttgggagggacttaccttggaaagttgctattctaggaaagagaaaccttcatattcctggaaacagcaggtagtttccagtgctggcaatgaattccccagaactgctgttttggattttttcttgcctggcagctgttgggagcagggtgcagtgaggatggagtgagagtgggcagtttcttgtgcagatttgcctttctttcatcctggggctgacttgcagctccacacccatccatctctcaaatttcacagagggtaaaataggcatttggagagaaagaactctggcctgattcctttctctcccacaaatgtcctttattcataaaacaggaataataattcctgtatctcccaactacatggaagctgcagccctcacagaagaagatgatctgagaaattctttgatttcctcagtacagttatacccatgcatcataatactttaagcctggaaggcatcttaaaaataatgcaacagtcaaacctaattttacagagaaactgacatgaaatcacgcagctaatcatgataaagctgggtggaaaacttatcttgatgggcagtacaggaagatgcagtagaccttaagatgtcctgaaagtttcttatctcaggggaaactcccaggtaggctttatgtcagggacacagaaaaatgctccctgaaagtcaaaatattcgggctagacagacaaattcctgtaagtgtggtttgtctgggaaccacagatgtcactaatcctggtttgctccagagttctttttgttcactcctaccccccatcaccatttgattgatctccttaccctgtaatttccccttcttgtcgcttacctgcagtatctttcccacccaggcatgccttattctttctaaaggaaagtatgaatggagaggggaaagcttgggaaactgatagatttccttggatgccaaaacacctccatagcctgtctgcccggccctatgtggaaacagcattgagtttcaagtcctttatgcctccacccagggatagccacttggaatccacatggcaattgtgaaacaagcaggaaatgcgtaattgtcagaattttgtggggaaaggactagggaataaggaaaacaaagatcttccttgtgttttagagctgtcagctagaggagcacctgcttgagtctgatgccatctaatggtcccagaagaaactgggttttgaacctagagttccatggactcttaggaattagactcctactactactaagcattcactggtgcttactatgtgctattgctgtgccaagtatctgaaacctgtcttcttaccttatttttcaagataattctatgtggcaggtattactatctcaattctaagagtgagaaaatggagttttagaaacatttactaacttgcctgggtcacatagctaaggaagaggtggacttgcccagctttgcataaaactcctcaaaagagttgcctatactccctgactccacttatcttcctactatcctctttttaaaatatattatttatttatttaaataagcaatatatgaatgtggtttgaaattcaaaagacacaaagaagtatacagaggaaagcctcactctcaatccttctcaaggtttgctaattcctcttgcataggcaatccgttcttccagctttgtgtttatctttccagagaagtttactgtgtattaagcaaatatgtatatctttattcttgctcagtattttcgcaaacagcagctgtctaagttcactgttctgaactttattttttaaattaaaaatatatggctatgtagtattctattttatggaagttccatatttcatttatcctgtttccttctactgatggctagttaggttattggaagtcttttgctgttgctagttagtcttgtatagacattgtaatgcacatgtgcaaaaatacaagtatgatacaatcttaaaggggagttgctgagtccaatatatacattacaaatattgatagatattgcaaaattgccttcatagaggctgtattaatttatagttccagcagcaacatatgagtttatctgtttctccatatatatatatatgtatataaccaacagacagtgttaatttttaaaattttgacaatcttctgggtgaaagtagcattgtattgtagttatcatttgctttttaatattatcatgtaagtaacagagatactaaacccagaaggataagggagcaaagatgagaaaaataaacacacacacaaacaacaataacaaatctgtctaaaatattggaaaatcagaatgagaaatgaaatatgactgtaacgataaaaatcagtaataaaaatgactattaaatttaaaaataaggcagagcaaccacaagtgacatgagaatgaggcagacaaagttaaagcacctaaagtctttgtcttgtttgaaaggagggtagagatattgattaccttcagatgctgccacatttggtaaacatgttaaaaatataagactgacttttaactaatataattagaatttaaaattcctaaatcagtaaggggaaattaaataatactttaaataaaaatgtaattgatttaatataagtgatgcaaggaaaacaaaagaagcaaagtaagacatagcaaatacagagcaccatatattgtaacagaaacgaatgtaaatagcacagtgatcacaagtataaatagcttaaatatgggagttaaaggaaagttctcagattagattaacaatatcgcaaaatccagttatatgcccttcataagatcacaagaaacctaaaaacatgaaaatgttaaatcaaaaccagatataagatacacaaagcaaacactaacagaagacagaaagacagcttatgtaattacagaaatatctaaacatatagtctaaaaccaaaggcattagtaaaaacaaagacagccattacatagtgataatgaagtcaccagaacattatactaaaactgaatcagtttgcacctagcaataaaactacaaaatatgtaagaaatataggagaattataggaagaaattaattgagaaattgaaacacatttctcaatgattatagaataagtggaaaaatgaataaggatatcaaataagcctgttgatgttcttgtctgtaacatctaggaatcaaaatatattctttaaaactaataaatcaagtgctcgtatttacacatttaagactacaaaggtagacacacacacagaaagaggaagggagaggatatgagctagttttgtgattgttcattatttaaaactaataggaattatctaaaggaagagggaactaagtgtattatatacaaataaacttatcaaagcaaccttgaaatatacaccttccttaatatctgaaaaggtaaaatttttaaaatgcacaataaagacatagtgaaagatttttaaaaatactcatgtaaacattatacttaacagaagttaatatctctgaattagactgaatctatttgctgtatgaataattataaatgggcttcttaactgaactaaataaatgaaaatatttttaaattagattaagataaaaactctattatttgcaatatgcaaaagacacctaacataaagccactcagaaagatgtattcattattttcaacaaataagatgatgggcaaagacataacaagagaaggcaaacaaaagggaagcagaggtcacattcgtcttaccaaacaagatgaaattcagacactcctcaccaaaaaaaaaaaaaaaaaaaaaaaattgagtgtgacagaggcacttataatgtaaagtataaaattcatatgaatatatgagacatgtgtttaagttctaaataccaaataggtagctcttataaagcagaaattaaggtagatacaaggaaaatattcagaaatgtactaccaatagaacactttaattccctttccctggactagaccagttaagtggacaaaaaaataggctgggcctggtgattcatgcctgtaatctcagcactttggtaggccaaggcgggtggatcacctgaggtcaggatttcgagggcagcctggccaacatggtgaaaccctgtctctaccaaaaatacaaaaattagctgggtgtggtggtgggcgcctgtaatcccagctacttgggaggccgaggcaggagaattgcttgaatctgggaggcaaaggttgtagcgagccaagatcgcaccactgcactccagcctgggcggcacagtgagactctgcctcaaaaaaaaaaaaaaaaaaaagtatgaacacagaagatagaagatattactatcaataaaaaaatagatatgctacatctatatcaaacttttaaaattgaaaatagaggccgggtgcagtggctcacacctataatcccagcactttgggaggcctaagcagtcggattgcttgaactcaggagctcaagaccagtgtgggcaacagcgaaaacccgtctctacaaaaaatacaaaaattagccagatgtggtggctcgtgcctgtggtttcaactacttggctgaggtgggaggatcgcttgggcccagttcaaggctgcagtgagctatgattgtgccactgcactccagcctgggcaacagagtgaggccttgtctctaaaacaaacaaacaaacaaacaaaaattaaatggctcaatggcatagaagaaaatttttttatgaagcaagtataatattgatgttaaactatgacaatgcacaaatataaaaattgtagatgaatttacttattatactgacacaaaaatcctaaataaaacattgcaaacagattctagcacagattaaaaaacacccattaagatcaaggggttttttttgttttttttttctagaaaaccctttggaagttcatgatattttgaatttcagtggatatttcctgggaataatgagttcaaatgaacgaatatgtggaacaaagcatcaccaacatttattttttcaggatgaggtgatggacaaaaccatcacagggaaattgaggcaaatagtacatgtaaaacaatacttcgggtgagtccacctatcccaaagtcgtatcaaagaagtggctgcagattggagcccaaagcctttggttcctcagtttccaaatggattctcactaggtgggatcatgagtttgctttggacaccccaaattctaactatttcttttgtttcttacatcctttccctcttccccagccccttcccctcatgttacacctcttgctggtttgagacgtcaatcaccactgagaaagaattaaaccagtattttgagctggcaaaattcttagcctagtacaattccttcaattaaactgtagctcaacaatgtgttctctaaaagtatgatttaatattctacctagaaactcagaatatttttcataactcctccagggcagtgtggattatgttgatgtgttaggaggaagtagaaggaagaaaatgaattgagatgtacgttttacttccatgtcaaagtcaccaaaatagcagttgaagggatatttgtgtcaggcaatagggagaataataattttatgccaccctcaaaaaacaaccacacatacacccaaattctctcactcctcagagaaaggggaaggaaagaaaagagagaagcaaaatatgagcttgagtgaaaaatcacagaggagcctgtagctatttagggagggctgctggctgaagtcaggcaggaaaaaaagatcaaaacaccctgccctatttttcaggctcgttcaagtagaagacaaaaacataaatacaggagaaaggaagaaaaccacatctttttcctcttgtctccccagaactgaacagtgtctctgataagcccaggcccttctatcgtagacactgacactatgcacagaaaatgactcaaaaacgcttctaatgggggtgaatctgatgcttcagtttatttaagatgtaccagaggccatctaaggagatccatagcttgctaactgaagcttattgctttctcttcttagttcccatgccaggctctatgccattccttgcttgtcatgtgagatcactgatttcctttggttaggtaggatatgatttccttacagagatctgtcctgacaccaaacagctatgatgaaattccttggttattttccctttttgtgtaccttatcattaccggaatgctaaagctgtaggaataaagtttccctggcttcccaagaaatacagtgtgacagaaaaagtatagcctagggacttactagttatgtgaactttggttcattccatccttacctcatctgtaaaagggagatcatgatagtatctactgcaaagggttttgtgtgatgattctctctctttctctctctctcatacacacacacgcacacatttatataatgcttagaaaatgaactcataataagcaattgacaaacattagctattattatgtaggcaagtcagattttagagtttgtgagccttagacacatttacagagaagaaagagcagccctcctaactttctggtccagcgccatatcctccacttcctccccatccccacatcccttgccatttatcaaccccctctctcctctaaatctaaatacaggcccccgtttgatccatattgtctaggcccttcctctcctctccacatggcccttccttcagctctgagggaagctgcagaagccagccatggtgctgtctacaaagaaggggacacacgcctcttccacccgctcatgctgttactgcatctgatcatctccgtgccgtgtccttgttcacttagcctgtgttgagtgtttgtctccatttccaaatgcaataaaacatctgggaaagactaaggtaggtgtgggcaggaagaagggaggaagttagacccagtggcttgagtgccctctgatgcctccttatcctcggctccacacaagccctcgccagtgtgagctccacagccatccacctggaggaggagtactcaaaaccagggtcaaatgccttgtactcgggggtctaccagtaagcctgtggccagccttccacttcatgaatcgtcacatttacatgagagatgtggagggagaggggtcagcctcctagctcctgtcctgtagcagttaagtcaagtcaggccaggctgtggtaaccaagccagtaccttctttaaagaacagttgtttctcattcatacagagtgtgttgtaggtgtgagtgattccctggggcagctgctcttcatggtgactcagctaattagactgcttttctactgggattgtgccatctcaacacaaggctgtcttggttgacttggtaggggaggaggagaagagtcatgcacgaggagttaaattctttgaccaggaaccttttgttcactttccattggtgagaacgagtcacacagctccaggagagtaggaagtctagtttctcgttttccatgggcctaggaattagaggatgaacactagcgatgtcttccacgtcttgctctctttttctttacctgttataatctcccatggagaagaaattatttttctgattggtctgatccaggcctctaaccaagggcatttactaagggtcatagaacagtaaaaggttgcacaattgcatctcacctctcttttctgaatcctgcttaattaaaactttaaaaactcacttacagaccacttcttgctcttcttagttatcaaatatattttcttccaactcctttttgacagatcttgccttgttctcagctgactcccttgcaaccatctaaatggaacttcctcattcccctttatcccctgctaatcgtcctgtctttattcttttatctgaagaagtgtacccttcttcccccaagccttatgctctctgtcttagtccatttgtgttagtgtaacaagatacacgagatagggtaatttatgaagaacagaaatttatttctcacagttctggaagctagaagttcaaggtcatggccctggaagatttgatgccttggccatcgacttgaaaaaagtcactgaagtgaacttgtggttaccatgataccctgggttcattcttaacatgcacagtataggcaaatcaggggcacatttcatgctgaaagatgatgtgaaatgatgagtaaacattgccctttaaataataataacatagatggtgaattacaatttgcacttttggttttatttgcttaaagatagtgttttactgtctaggttttactgaaagaatacttaactaaacacttgagtcaaatcattccagtgtaacagtcctcacaaggaggaaggcagaagggcaaaagtgccaagctattgcctccagcccttctatttttattgattgactgattgattgattgagacagggcctcgttctgttacccatgctggagtacagtggtgcattcatggttcactgcaactttgaacttctgggctcaagtagtcttcccacctcagcctccaaagtaactaagaccacaggtgcatgccaccatgtttatttctttaattttttaaattttatttggacatgggggtctcactatgttttccaggcaggtctctaactcctagcctcaagcaatcttcctcctcagcctcccaaagtgctgggattacaggcatgagccatcatccctgctctctctagccctttttaaagtctctaatcccattcaggaggcctctgcattcatgacttaatcacctcctaaagggcccaccttttgatactatcacattggtgattaaattgcaacacttgaattttgagtgacattcagaccacagcattttggagaaaatgtcccctttcttctcttttttctcttcagtttctcctttctacagataccttgcacttcacttgcaaccttgttgaagtctctcctgtcttaaaagtttcttttcccaaaacaccagaactcattccttctgtctaactgtaactttgtacttgttaccaacctctacccatttctacccctgactccccagcctctggtaactcctaacgtactctttacttcgatgaggtcaacttttttagattccacatatgagtgaaatcacgtaatatagtccttctgttcttggcttatttcacttaacatagagccctccaggttcacccatgttgttgaaaatgacaggatttcatgcttttttatggcggaatagtattccatcatgtatatatatcacatactaattaccctgatttgatcaatacacaatgtataggtgtgttggaacatcatgctgtaccccataaatatgtacaattattacgtgtcaatttaaaaaacccaagaaaagtattttttcttagtgttgtttttttctaaagtgtatcccattttttcctttgttttcactttcaaaattcttgaaagactattttaatctgcggcctttgttttcttgtttccaattcattcttttgaaatatggcttctacctttaacactctgctgtcctcttgaaggttattggtgccctactaaccataaaacacaataatgctctcttagattgtatcctggtgagcctttttgcaaaattttattctttgagaattctctttccatgttttcttttcttttctttttttgtggtcattttggcttataggaaatcgtactctccaaatgttctctatgtcttctatttcttctctgataatccctttactaaatcttcttgaggcatatgcttcagaatgcttaatttacatactcttaattccttcttaatttacacactgcctgtcggcaatgtcaacacccaataagaagggagacctattggtcagaacaggccagggaatagaagaatacataataaacagtctgcctagttcttctagggccccataatatgtcaaacatatatttttacttcttctcccagcccatttttagtatacctaaattactgtcagtgattctgcaggcaaacaatggttgagttgtatgacacaactttgtgaaagtatcctacccagtacctgatgatgcaaaactcttctatcttgattggttgtcaatctgaggagtttccaatcctggggaagccagaaaaacagcgatttatactcttaatgggtactttctgactgaattttatgagctcattctgaagaggctgacgattttactatctcatttttttcctttctccagaatgggttctgggtgggtcccctgggtggtggctctgctagtgaatctgacccgactggattcctccatgactcaaggcacagactctccaggtaagaacagagcaattgtttttttccagtgtgtatgcaagaattggcatgggggagtgatgcctttctttgtaagtccaggccacagaccagactggaagtggcttttggtttcaaagaacagtgttcttccctttggcagaaaggtacgccttgcctctttacatgggatggacttcatataccagagccacctattcaaggggtagggaggcaggaagagggaaacattgtgtcttgtttaggatccttattgtgtgtatcaacctcagtcagtgcctgggcgtgttgaaggccttggcttgggttcgagcctgctgggagaaacaacctgcagtaggctgggtcacagaggcaatctgtgattttttggtcaggacacggaaacaaatctcagttggggtatatgtggacaaatgaaactggaaacaaaggttgctccttctgtcatttattaagccactattatattgtcagaattgtactaaacagttttgagaagtaagagaagttgaatagaatacattgtccttgtcctccgcccaccaggtacaagttacttgtcactgttatttttctagcacaggtgacagaatatgcagccatgaagcaatgtgagatgaaagcacatattaatgagcagaaacaggatgtaatgtgctaagaacagaatcccctttgcatgttagtttcattaaatacaaaagaggaacaaacctggccaggagagatcattattctcagagaatagaaaccgccctgagtttataatgtccattaaacaatacaactgaaaaaaaaatcagcacagatgttaaatgatgatgaaaaattcagatttcccccctagtttagactactagaggaaatagagaagagtatacatgctgagaaattacaggctggaacttcatctgaaattagctactgagtgagggataagtggggttcacctaggaaggtcattcttatggctcagttcagagttggaggaggctaaaggaaaggtaaattacaacccaacattaatagcaattatctttcaagtcttgacttagatgcaatgtcttcaggacgtccttcctgacttacctacattattaactccatttgaatttcctttttattgtagttgttgttcttaagtgcataggattggtttaattttacccaatgagttcacagcacattgtaattattggcagtagtgcaagactctctcgtctcttctcttgcctccgttctcattctctcccctccctagagaatccattctaaacgtgtctggtaagtctctaagtatgagagtggcttttagaaatatgtagcattattgctctttatgtgtttttaaaatttaataaatgtcattctctgttgaatcccattctgtttcttttctcacttgacactgtgctttttgagcatactgaggtcaaaggcctcctcttagatccatgtggtctgacgtaatttaccaggcatgggttttcccagaggagggggctggttcatggttttggttttggttttccagaagattttgtgattcaggcaaaggctgactgttacttcaccaacgggacagaaaaggtgcagtttgtggtcagattcatctttaacttggaggagtatgtacgtttcgacagtgatgtggggatgtttgtggcattgaccaagctggggcagccagatgctgagcagtggaacagccggctggatctcttggagaggagcagacaggccgtggatggggtctgtagacacaactacaggctgggcgcacccttcactgtggggagaaaaggtgagctggaagctgaggtctggcggggctcaggaatgtcccccatgtgaacctggccatggctcttctttcttacaagcaattttctgctttaggataaatggttgtctgtgtagatgttctggccccagctgtgatatattatcctcacaagtcagccactgtgatcttggtctcagacccccaaggttctcagggacttcgagggctattgtgccctcaaagagaagcagtaattgtgggagtacctcagaaagtctaaatcctcctgacaggcattgacataccctgttactgatcttgggggctgagacttgcctatactttgtgttcacttgggtgatctgggaaagagattagacatagtgatagtccctaaagaatctcctgtcccagcttggtggttttctttcacggtgtctcatttttcctcccttcctagtgcaaccagaggtgacagtgtacccagagaggaccccactcctgcaccagcataatctgctgcactgctctgtgacaggcttctatccaggggatatcaagatcaagtggttcctgaatgggcaggaggagagagctggggtcatgtccactggccctatcaggaatggagactggacctttcagactgtggtgatgctagaaatgactcctgaacttggacatgtctacacctgccttgtcgatcactccagcctgctgagccctgtttctgtggagtggagtgagaattagtttctagtactctctgggcctgactcaggactatactgactcaatacagagcctgtgtcacttctgcgtttatcttggtcacaacatgaattattctttcccttgatctgggacagtcacagaaaccagagtccttgggttagggtgggagaaaacatggcagatatctatcctcatatcttccaagaaatgaggagatctaatcacctcattatgtgcttccaaccctatgaactggtgtcctctaattctttggtcttagtatttaggaggcattcttatgggctgtgagaatctgtaaccgatggggggtaactccatgggtgccaactttggtttcgaagaaccttttctaaatttatttatttttctctagctagcattggatttggtgtctagtacagattctgggattccaagaaagtgctttaaatattgggatatttttactaatttaaagacctgtttcccataggagctcagtctgaatattcttggagaaagatgctgagtggcattgcagccttcctacttgggctaatcttccttctggtgggaatcatcatccagctaagggctcagaaaggtaatgagcctgtgaggagtgccctgccacctgtcccagaccttccccactcccaccttccctaacgtcaatgatctgaggcaaggaaagctgattgtgcctctcagggatcaccgggataatttttttctgaagctagaaatgggataagcagagagagtgctgaccttgccagccatttgttcttccctcgggataatcatattgggtcctaattggggcaatccattcttttctcgatttctttccaggatatgtgaggacgcagatgtctggtaatgaggtaatgtctctttttccttgtctttgagtggcagatcattctcccggttctttggccagagggagatgacatgggggtagggaggagtaaggttgctgctgtctggatgggactgtcccctgagtctctggaacggctgtggggggtggtgaggctgcctcctgagaccttcatcactgtgcctccaggtctcaagagctgttctgctccctcagtcatgctaaggtcctcactgaagcttctctctctggagcctgaagtagtgatgagtagtctgggccctgggtgaggtaaaggacattcatgaggtcaatgttctgggaataactctcttccctgatccttggaggagcccgaactgattctggagctctgtgttctgagatcatgcatctcccacccatctgcccttctcccttctacgtgtacatcattaatccccattgccaagggcattgtccagaaactcccctgagaccttactccttccagccccaaatcatttacttttctgtggtccagccctactcctataagtcatgatctccaaagctttctgtcttccaactgcagtctccacagtcttcagaagacaaatgctcaggtagtcactgtttccttttcactgtttttaaaaaccttttattgtcaaataaaatggagatacaaaaaatgtacattttagtgaattatttaagaaaaacccctgtaatcaagtcaaggaacaggactttgccagctccagcggaagtctctgtacgtcaggccaatcaaagcctctccttcccctcgaaagtgaccatatcctgattttattgtaacctctttcatgtctttgtagtctagtcccccaggtatgtgttcctggacgccacagcttagttgtcttttacgtctctcatacttcactggtttctcccccttcagcctttttttcccccttatgattaatctgttgaaaagctcaatccatttgacctgtagagtttcccacactctggattttgctggctgcgtacacatggtgcagtgtaacacatcctctgccttctgtgcctcccgcaaattggcatctggatgcagaggctggatcagactctggttcaatcttttcctttggaaaatctatacgtggtgttgtggcctttcaccatgagagacataatttccagctgtttctttttgtgatgttagcaaccattgatactaattgcttaggtctgttaatttattggggattgctaaatggtggtattctgtcattttttcttcatttatatgctttattaatgctacaaagagacagttcccttcatttactagtgaagagacacttccctccacttactagtgggctacttagtggtacagtggaaaggcaggatcagtgtttgactctccttttatttaccagttttcaagttagcaaattggtttcctactattaataaaacctacagatggccaatcaggttttacttttcattctttaaataattataaacagaaggatttaaatgtttgataggttttactctattgcaatttttatgcttgttaaagcttatatcctacatttttggtgagtgaaaacttcttcaagtggctaaaaatgaaactgagttcttttgacgcaaatttcttttgataatttctttgttatctgggatgacaacatgtttctggttcatcttgttcatttcttggccagacctggaggtagccatttttccagaaatccctggtttagtttagtgggaaatgacatttaagactataatccagcgttagggtgttttgtcccactgaacccgctgctggagtcacctcaaaagtggcgtcaagggagttaccacaaggaagttcctgaaaccattctgagatggtgtgggttaggattcaaagaaagaagcactaaatgccagggtgatcagtccaaaacatttgtttagggaatttacctacagagggcttcaggagtccttgcagacagcaagagaaaagggatgttctgcctaggtatgtctgcagcgagggggtcagggtatggagcttatatgaaggtttaaggaacctggctcagggctgggacaaagtttcagtgtttagagaaacaacctagatacgtttatcagtgcctgggagtgttcaaggccttggcttgggttcgagcctgctgggaaaaacctgcagctggctgggtcacagaggcattctgtgatttttcggtcaggacatggaaagaaagcagggagaggggcagtgggggagcctaaatagataggaatggtcattgtgtccagcctgttcaatggcaataaaacatttatacatgtatacatttaaaaaaatcagtcatccaggcacggtggctcacgcctgtaatcccagcactttgagaggccgaggcgggcgaatcacgaggtcaagagattgagaccatcctgggcaacacggtgaaaccccgtctctactaaaaatacaaaaattagctgggtgtggtggcacgcgcctgtagtcccagctactcgggaggctgaggcaagagaagcgcttgaacctgggaggtggaggttacagtgagccaagattgtaccactgcactgcggcctggtgacagagcaatactccatcttaaaaaaaaatcagtcttctctatattacttctgcatctcctttcttttataccaagaactctggttttcaaggacacagggacagacacaattagaatgtccatacttatttgcttttcctgagttaacatagacagcagtctaaggataataacactcatacacaaccaccaaaatggctactgaaaacggttgaaattctttttacctacattctccctattacctgtgttctccctttttacctatgttctcccccgctttctagttgaactatgtctatattagttgatcctgtaccattgcatagactacttgctcccttgttagtcttagttctgtgagtagagatatgtttaatgctcaccatcattccttatgttgatatccctgtcatgtggtggttttcaaggtgtggtccatggattcctgggggtccctgggacccttcaaggggcctatgaagtcaagctatttttgtactaatactaagatgttatttgcctttttcactgtattatttacatattggtacagaaatctatggtggtcacgtgaaactgttagtgcctgagcacaaatcaaggtggtgacacaagctgtacaggtaggtcatgttcttcactcgccataagcttacagtaaaaaaaaaaaaaaaaaaaagcaaaagccagtgaccttgatgaagcaataaaatcattagtttactaaattttaaacctcaagcacacatctgtttaatagtcagtgtaagaacataggcagcatttctggtgcatactgatggaaaggcagttgtcctgtggaaaagccattatgtaattgcatgagttgtgagtgaagttaaacattttttttttagtgggtcatcattttccttgaaagaatgactgaaaggcacactgtgattattcagacttgggtatttggtagaaattttctcaaaaataaacaaaatgagcctatcccatcaaagaaaataatattgacagtggaaattggaatttcaagagaaaattaaaattttggaaaacttacgtgtgccacagcttctcactacttaaagatgtttctgatgagattggtggtgatattaacaaatatggcttaaaaaatattgtttaataaaatatgtcaacattttaaaaatctgcgtaaacccatgaatcaataatttacaaataatcaatgcatgatattgcaaagtcatgcataaagatccatttaaagatagactagtgaattttaacacaacagaatatgaaaagttaatatataaggtttcagattccacactgcaactaacctttaagaatctgccatttcttgagttttggtgtcttatcaaggaagaacagttacgatagctgaaatggttatggaaactttccttcttttcccaactgtgtataagagtgaggccagattttcctcttgtgctttagccaaaacaacatattgttacagcttgaatgtagaagaatatataaccaagctagctttattaagccagacattaaagagatttttacaaatgtaaaataattccttttttttcactatttttttgtgctggagaagacagctattttccataaaagtgtgttgtttatgttaacatgtaatgggtttgttattgttatttaataacaaataaattaatataaatgtcactttacataacccatgtaaactaaagcttcttggtgttctcaacaattttatgaataaaaagggatcctgatatcaaaagaattataagctactgatgtagtcatcatgattgtttgaaactatttctcctaggtgcctcaggaagacttaggaaagtgtcttagtttgtatgagctgctataaccaactaccagagactggatggcttaaaaacagcagaaatgtatttttcacagttctggaggctggaggtctgagatcagtgtgtcagcctggtagggttctggtgaaggcctgctggcagcatcttctcactaagacctcatgtggcagaaggaaagggagctatctggaatctcccttataagggccctaatgccattcataagggctgcaccctcatgacctaatcaccttccaaaggcgtcacctcctggtactgtcaccttgggcgttacgatttcatcatatgaattttgggacggcatatacagtccacaccaggaagttcttgcacttcatagtcgaaagtcagttttgtggctataaaaatcttggttccattttccgctcttgagtatcttaaaaagttactacattttcacataactgctatcaaaaagtctgatgataatctaattattaataagtcattgctacttttgctgagtatccagatggtattttctttttctttagtatccacaagttttattggaatgtatcttggttggggggagggcaagatcgctgactagatgcagccaggtgaaacagttctcaatgaggaacccagatgactggcgtgctcctaacagatgttcagacagaaggcacctagagtggacagagggaagacacagaagctggactgaagtgggagaaagctgggagccctacatggggctacagcacatccagactcattcctgtcctccaatggctccaggaaaatgggtgagttgaactggcaaggaacaacccactgtcactatgacctctgcaaccatggcaggaggagacccattgaccaccatggacacttgagttggcaggaagagctgcttagagaagccgtaggggtggcaagccagcgggtgtggagcctagaggattcagtgcaggagcatctgcagtggagcatggccagggatggccatttccctaggctcaacttactcccataggagacattagccctagggaaactgttggtcctgaaatctgtagggtggtcttgcccatcagatgagtctggttctacctgagcaaccgttggtcttctggcctctcctggggccctggcctggccacatctgcttgcaaagcagcctcaggtgctctgtgggcctgcaccatagcttctacactggcagaccatgactgaccagtaagtggagagctccaacgaggaggcccctatgaccaggcaccagcctgcatgctccctccccacactgcagcttcctctgggcccacagcaactccccacatcattttgctggtacatgtctgctgggtgggttttgttttccttgcctcaccagcatataggagtgtaattcaccccccaccaattccctcctgacagccattgcagacagagccttggtgggcacagagccagccagccccactccctccatcatcccaccctgtgctaacactgtgcagagaacagctgatcctcccccaccctgagtgaccactcctgcacagaaaaggcacgcagacctgcacctgccaatgccttgcccctaagccaacaccacttcctgtgtgaccacacacacagttgccagcaggggacccccttcctttcctgcagttgcattgcctctgccactgtggtggatgcctgcagggaggtgggcaccccggcacctgctagtactctgctgcagcttcaactaccactgctgctggtacactcaaacaaggacagatcctcctgtcactgtactatgaaacactttggctgacaccactcattggagtgtagtgaccagtggtctgggagcacttcggactgcaccactcctgccacctcccccaccccccgcccatcacagcggattcctaattctgaggaaacagagaacaaagtcagggccccgtacaagtcccaaagaattacagcatgcagtccaggagttgggagtggaatactggccaaataaaattgtccagaaatgaagtcagttggctgaatccaccttataccacaatcaaaccctcaaagtcatcaaataggataaataggataaataaaaaaggttggatgatctttgctgtccaaaggtcagcagtctcaaagattaaaggaaaataagcccacaaagatgagaaagaatcaggcaagaaccttgacaactcaaaaagccagagtgtcttctgttctccaaacgaccacatcacctctcgagcaaggattctgaactgggctgagatggctgaaatgacagatatgtaattcagaataaggatagaaatgaagatcattgagctacagaagtacattgaaacccaatccaaggtagctaaaaattatgataaaacaatgcaggagctgatagataaaatagccagtatagataaggacataaccaatttgatagagctgaaaaacacactataagaatttcataatgcaatcacaactattaatagcagaactgacccagtggaaaaaagaatctccacacttcaagactggctttctgaaataagatagtcagacaagaatagagaaaaaagaatgaaaaggaaggaacaaaacttctgaaaaatatgagattatgtaaacagaccaaatctatgactcattggtgttcctgagagagatggggagaatgaaaccaacttggaaaacatatttcagggtatcatccatgagaatctccccaacctagctggagaggccaacattaaaatacaggaaatgcagagaaccccagtaagatacttcacaagaagatcattccaaaggcacataattatcagattctccaaggttgaaatgaaagaaaaacagttggcagctagagagaaaggccaggtcacctacaatgaaaagtccatcagactaacagtggacctgtcagaagaatctctacaagccagaagagactggggccaacatttattattcttaaagaaaataatttcaacccagaatttcatatctggccaaactaatcttcaaaagtgaaggagaaataagaaccttttcagagaaggaaatgctgagggaatttcattaccactagacttgtcttacaagagctcctgaaggaagcactaaatatggaaaggaaagacttactagccactacaaaaacacactgaagtacacagaccagtgacactataaagcaaccacataaacaagtctgcaaaataaccagataacatcatgatgacaggatgaaatccacacatatcaatactaatcttaaatgtaaatgggctagtgccccaattaaaaggcacagagtggtaatctggataaagaaccaaggcctattagtatgctgtcttcaaaagactcatgtgtgtcatgcagtgacacacataggatcaaaataaacagatggagaaaaatctaccaagcaaatggaaaacagaaaaaagcaggggttgcaatactagtttcagacaaaacagactttaaaccaacaaagatcaaaaaagatgaagaagggcattacataatggtaaatggttcaattcgacaaaagatctaagtattctaaaaatatatacctccaaaagaggagcacccagattcataaagcaagttcttaacgaccttcaaagagacttagactcccacacaatgatagtgggagactttgacaccacattgacaatgttagacagatcatcaagacagaaaattaacaaagatacccaggacctgaactcagctctggatcaaatgaacctgatagacatcttatagaactttccaccccaaaaagacagaatatacatttttctcattgtcacatggcacatactctaaaatcgatcacataattagaagtaaaacactcctcagcaaatgcaaaagaactgatcataagaaaaaatctcttggaccacagcacaatcaaattagaaaccaagacaaaaaagttcactcaaaaccgtacaattacatggaaattaaataacctgctcctgaatgacttttgggaaaataatgaaattcaggcagaaatcaagaaactctttgacatgagtgagaacaaagatacaacacattagaagctctgggacacaactaaagcagtgttaagaaggaaatttatagcactaaatgccaacatcaaaaacttagaaagatctcaatttaacaacctaacataataactaaaagaactagagtatcacagccaaccaatctcaaggctagcagaagacaagaaataaccaaaatccagaactgaatggaaggagattgagacacaaaaatgattcaaaagatcaatgaatccaggagctggttttatgaaataattaataaaatagatggacttctagctagactaataaagaagaaaagagagaaggattcaaataaacacaattaggaatgacaaaggaggtattaccactgaccccacagaaatacagacaaccatcagagaatattatgaatacttctatgacataaagtagaaaatctagaagaaatggataaattcctgggcacatacaccccctaagactgaactaggaagaaattgaatctatgaacagactaataatgagctctgaaattgagtcagtagtaaatagcctaccaaaacaaaacaaaacaaaacaaaacaaaacccaggaccaaatggattcacagctgaattctatcaggtgtacaaagaagaaatggtaccattcctgctgaaactatttcaaaaaattgaggagaagagactcctacctaactcattctatgaagctagcatcatctaaataccaaaacctggcagagacacaacaaaagaagaaagcttcaggccaatatccttgataaacattgatgcaaaaaatcctcaacaaaataccagcaaaccgaatccagcagcacatccaaaagccaatctaccatgatcaagtaggctttatccctgggatatgaggtttgttcaacatataaaaatcagtaaatgtgattcatcacataaacagaactaaagacaaaacccacatgattatctcaatagatgcagaaaagtcttctgataaaattcaacactccttcatgttaaaaactcttgataaactagttattgaaggaacatacgtcaaaatagtaagagccatctatgacaaacccgcagccaacatcatactgaatgggcaaaacctggaagcattccccttgaaaactggcagaagacaagaatgccccctctcattactcctattcaacatagtactggaagtccttgccagggcaatcaggcaagagaaaagaataaagagcagccaaataggaaaagaggaagtcaaagtattcctgtttgcagatgacatgatcatatatctagaaaaccctatcgtctcagcccaaaaacttcttaagttgataaacaacttcagcaaggtctcaggatacaaaatcaatgtgcaaaaattactaatatttctatacaccaacaacagtcaagcctagagcaaaatcaggaatgcagtcctattcacaattgccacaaacagaataaaatacctaggaatacagctaaccagggaggtgaaagatctccacaagaagaactaaaaagcactgctcaatgaaatcagaaatgacacaaacaaatggaaaaacattgcatgctcatggataggaagaaacaatatcatcaaaatggccatactgcccaaagcaatttataattcaatgttattcctattaaactacaattgagatgcttcacagaactagtaaaaactattttaaaatgcatatggaaccaaaaaggatacatagatacaaaataaggacatgaaaacatgtgcaatgtcattagccattagagaattacaaattaaaaccacaataagatattactatatacctatcatgatggctaaaaataaaaagtaggcacaataccaaatcctggtgaggatgcagagaaaatagatcactcacatttggctgctgggaatgtaatatagtacagccacactggaaaatagtttggcattttctttaaaagcaaaacatgcaaccaccatacaacccagcaattgcactcctgagcatttatcccagagaaatgaagacttatgttcagagaaaaatctgcacatgtatgctcatagcagctttattcagacaaaaactggaaacaaactgtggtatatccatactaggaaatactacttagcaataaaaacgaacaaactggatacaggcaccacgacctggatgaatcaccagggaattatgctgagtgaaaaaaaaaattgcaaaatgttgtctactaaatgattccacttacataacactcctggaatgccaaaactatagagatggaaattaataattgctgtgttaatgaagaagtggaaatgggagggaagtggctgtggctacaaaagggcaaaatgagggatattatagtgatgaaagtgttctttattttaattatatcaatgtcaatatccagactgtgataatttactgtagtttacaagatgttatccttgggggaaactgggtaaaatgtacatgagatatctctgtaacatttcttacaagtgtctgtgaatcaacaattatatcaaaataaaaagtataatttaatacagcatcttaacattttcaacaaaactaagtgtcaaagtatccccataaacctcaaatacaaattggtgaggacaaaccactagtagttgcacgttattaatttttcctgttatggattatgcctttggtgtcaagtctaaaagctttttgcttaatcctagatcctgaagattttctcctgagagttttgtgactttatgttttacatattagactttgatccatttttatttcttcctttgaaatctgcacgccttttttttttctcgcccattacattatctagaacttccaacgccatgttgaataagcatggcgagagtggacatcattgctttgttcccgatctttgggggaaaaatttcagtctttcaccgctgtgttagctgtaagattttttgcagatgctctttatcaaattgaggcagttcctctctatttgcattttctgagcattttatcatgaatggccattgaattacgtattctaatacctcatatatgtacatcattaacttggattacacttctttaaatagctgcctgttctactggttgtcaaatgagctgtatcctttctatttaatgcctacatgaagtttttaaatatggactctatgtcatatatttagtccctttcaggtttccaacataaagtgatactatttcagctacttaagcacttatttaggatttatgcctcatgtagtttagatttattatgagtttgcacttacatttgattcctttttatactcctaatgtctttttttcttaaacaagtggcctatatatttggactcacaatatttatacatcctctgtcaccaggggtacatgtccttataccttaaagcacgtgcttctggagtcctgtcgtgttacatgtttcctctaaaacaaaccctccatgttatttgagagccaaccccacttttcaagttatttaggctgctgtaacctccattaataaaggattcaaaagtcataattgtgtgattctttaggaattatccaaaaaggcaatctgatttattttccaaatatcctggatctgaaataatctatcagagtttatttctatgcttggaaagcttccttggatgtcagcatttgcgattttcttacttagcttatgtagctaagtaagaaatgaattgcttttgttggtttcttagtacattctgtccatcaagtacattgagttgtttagaattgttttgagtcaacagtgtaacaagcatccaaaatcttgtatagtcaattttgtttgactattgtgctagaagatcaatttctatttcctctgttgacaatatcctgagcattttgaagttacacaattgcagtggtaatttagcggaagagtgttaacattttaacctaaataattgattttgtattaaacaaattctgatgtaggaatgtatttagtattaactatatggaattctctataaatctcataaacagagtagttgcttttttgaaggggattaaaaattaaatatcaacattttcattttagaaaataaaaaatgtggctcacgcctataatcccagcactttgggaggctgaggtgagcagatcacgaggtcaggagatcgagaccatcctggctaacacagtgaaaccctgtctctactaaaaaatatgaaaaattagctgggcatggtggtaggtgcctgtagtcccagctacacgggaggctgaggcaggagaatggtgtgaacccaggaggtggagcctgcagtgagccaagatcatgtcactgcactccagcctgggtgacagagcaagactctgcctaaaaaaaaaaaaaaagaaaagaaaaagaaaaggaaaaaatgtcttttttctttttaaaattttcctattttaatatttaaaattattttatcttttttttaaaaaagttatacatgacatggtttaaaacatcaaatacagatggttcctgacttatgatggttccacttaagattgttcagctgtgatggcgtgaaagcagtacacattctggaagaaatgtacttcaaatttgaaatgtcagtctttctctgggctagtgatatgtggtataacactctcacctgacgctgagcagcagtagtgagccacagctcccagtcagccacgctaatgtaagtgttctgagcatgttgagggtaggctgggctaaactatgatgtttgataggttaggggtattgaatgcattttcaacttgcagtttatcaggacacaaacccacctgaagtcaaggagcatctgtatttctacagggcttgttatgcaaaacagctgaccacactgcctccccattcctctttccagacagaaattctagtagatagtcccattttacaaatgagaaagtggaggcttagggaggttaattaagacacgcaagttcatatgggtaggaagcgatggagctatgataagaactcaaatccatatggtccccaagcctgaggtttgagctatattgcttcgtgattacaggatatattagtttcctattggtgctgtaacaaattaccacaatttagtgttttaaaacaacaaaaatttattgttggacagttctggaaattataagcctaaaatgggtcctgttaaattaaattaaatttggcttaaagcggcctctgtactttgaattcctacgtagtatactgaaatctaacttaatgtgtaagaaaattgtaccctaacttaagagcatattcttgtaataaatagctgagtctcaggcaaacacagcagccaagcttcaggcaatcacaggttgccaactgatcagaccatgatcaaataaggcaaatactgagctgtaaacaagctgcttctgtataccacttcctttttctctctataaatattgcctgcccctattgctcagtggagctctctgtacctcttctggtcctggatgctgcccaattcatgaattgtgctttgctcaaataaatcaaaataaatttcatttgttcaaagtttttcttttaacacttgtacagggctaatcaaggtgttagcttgtctgtgttccccttctgaaggctttagcggataatctgtttttgcctcttccagcttgcagcgaccagctgcattcctcggctgatgcccccttccagcaatcactttcctctgatttttgcttctaatatcacatctccttcttctattctcttgcctctttctttcacttagaaggacccatgtaattatatcaggaccacttggctaatccagaataatctccccatctcaagatccttaatctaatcactaatgcaaagtcccttttgccatgtaaggtaacagattcacaggtttcatagattcagatctttcaggggtggcagttgggggcattattccatctaccacacagagtaaagtttcatctggatgacccacaggccctacaaatacaaaatgtctaatatggaatgttctcttaaactgtcctttcttgatgactggaattactaaccacttggtctcccaagcatcttctgctctcgccttctcctctctcccatatacaatggatgacgacacatcatgttgcatctgctccctcacatgtctctgaccctctctctagatccctgatcctactttaattcgagccccatcatgtctggtctgtgttactctaacagttacccacgctgctttctctgctttcaattttatgctcctctaacccactcttcccatcagagtagtctttctaaaacgtgaagctgcccatgacccttcccttactatcagtctgcatactggtcctactgactgcagatcaaagacccaagtccttagcctggtgtgtgaggcatccatccctagccctctgcttcatctgtcacccacccattttaccaattccgaaagactttcacttccctcgaagcctgtccaagtgtccaagccgctcatgctttgttagacttggaagccattctccatataccctcgatcagcttgaatgtcatttccactagaaaattttcctaattgtttgtgacttcaatgtcctaattttacacacatttctgctgtgcccctttgtttgctaatatgtctcctgggtggtaagcaggactccgtgtcttattaatattttccgtctccagaattcagccactgtctgccacacaagtgcataatgagttactatactaatattatgcagccatgtcccctgtacagcagttccctggatctcatggcttcttttttgatttgccttgtttgttaccaacttccatcagtaagacaatctatccaatccttgtcccctttgccacatcacatcctcagggcaataacaaagttgttaagtttatgcaccttctccacttggagcaaggcctcaccatgtcaggcctccgcctgattctcctccctgcctgggatggcagattttgctctagtgggtctccaggccgtgaggtctcctgtcttttatgttctgatccgggtggtgagctgcagctcactacaagtccttacttgtctctgctggcctttagagactttgtactcaatttggaggaactactcttgatggattgtaagtgagaggatttcctggtctccctctggagtccgccagaaaaccacattctctgcttttcagcgttgactgctcatgcttacgtaatttctaagagtaagagcctatggactgtcctggcagcaaagaattcgctcaggattttgcctgaagctgcacttccggggtctcgcttcatcagaagacttcttcattttcatcatcggcccagcgatgcatgggtacctcttagggtttagccccagaatgtactgggggaggggagggtaaagtaggtggggaaggagtcagagtcgtaggtcatctgtggctggagttttgcatccctaataaacgggaaatgaactgaaggaagactgggttttcacgtcaacacgaaggacaccattacgatgctagactaatcatcaaataaaattccagatggaaaaaattcagaaacttaatttggaatttgagccccgctctattatgcaacgttcccagccattgctccgcggatgtaatgtggacttccaccgccagatggcgatcgagaccgtaatttaagttggttttctcaacttcctctggactgagtccccgtgaaaatcccaagtttaacgaggggctttcctcgcgtaaccttcgcttctgcttcctctctcacatcacctcaacctgcgagactctgaaagggataatgagggttggggggaatatggaaattcagggaagggagaggggggtggtgtgaagctttccagaccagccacacagaaatagcgtaccaatagtggtttagagcacagacccccagccagaatgagtaatttaaacagccctacgatgtaatcgttgtgtgcatatgcatctctatgcctctctctctctctgtctttctttcatctgagacagggtctcactccctctgtcccacaggctggagtgcagtggtgcaataatggctcgctgcagtcttgacctcctgggctccagtggtcttcccacctcagcctctgaaaccacagggtcttgaacttctgggctcaagtgatcttcctgcctcggcctcctaaagtgctggggttacaggtgtcggccaccatgcctgtctgctatttaagtgcatagaagaatgcctggcactcagttagtgttaaatatttataaaataaattaaaattttataacactacacacatgttgttgagtatgtcataaatagagacatatttaatgagatgtcaacatatatcacgttaatgaattaagtaagtttgagaatattagagaagaatgataatagattaacggaggaggctggcgcagtggcccacacgtgtattccagcactttgggaagccgaggcaggcagatcacatgaggtcaggagttcgagacccagcctggccaacatggtgaaactccttctctactaaaaatacaaaaaaaaaattagccgggtgtggtggtgtgcgactgtaatccctgctaatggggaggcggaggttgcagtgagaggagatcgcaccactgcactgcagcctgggcgacaaagcaagactccatctcaaaacaaacaaacaaacaaacaaacaaacaaaaaacagacgaaatagggtttgagtatgtagtctgctctcaacatgagatagtaaagtctttgcttcccttatattctgttaattaactcatttgatgcacatcgatgtataaagcctttaacttctatttattcttttccttgaaaagcatgcggaatgccttctcaggactctcccattttttatttgtgaacacccactggcattcccggatacgaagcttgcaagaaggtgtgaaccgccctatactcgtgagcccctggggctctgtactctttccagcccacatttgacctcagtcaatttttaaatgattccagctaaattcttcttaccagtgcccagctgtacctgccttaggtaagcaagcactcaggcaacaactttcctagatttcaagctagttggaagctcaatcccagctctgtgatgggttgaaaaaaattgcgaccttgcaatttgtgtgatttctttcatgttgcaaggaagcatcattgtttccagttctctgcatccccaagcagaaaccagaactctatataaacgtttttaaatggagacattgagaaaaagtacccgagaaaccaatgagatacaggaagaatgcttccagcactaacatgaatggggcttggccatacagatagaagggttggaaactcttacgccttgatttaaactctctatgcatattctgagcacgctggggaatgtactactactaggcttgatttggattcatggctactacctcccacaaaatgataggtcttctgttttagtacgtgagataattcctcaatcgatcttattgctgctatttctgttaagcataaacaatgatttgggtcacaaatttcaatggggtttaaattcctttgtgcatcccaacaggtaatcctcttactctgggctatgaacttgctactgccaagatggatgccatgaaaaaaagagatctcatcaaaatggtcacagagagatggagggcctctgtgtagatggcagggtggtggtggccgtgtaactagctgcccggtgaggagcagcccttggggagagcccaggtaggaccaggagaagcagaaatagagaaaagtgaaagatcgaggtggaaagaacatgagggacaagagctctgcatggccacatcaccagcagtcttgttattacaatgaggatgaagggactgaaaagaggggaagagatggaattcatcaaacaacagtgctcattcatacaaggtaagtatacatgtggccttttctctctctatctgaagatgtggcttactgtaacaggaactatcatgggcattggacggctgtctcatggtgatcccatcctcctctacatcctaaacttttttttgaatgcatttctgtattttgacttcctctctccccaaagttcttgttaacttctgagtatgacttagcttccttattctttgaaatatttgaaacccctaacttcctctcctctgtggtgtaactcacatggcttcttgataccaggaggcactgtctgcatacaacctcatattatgaggatgaaatgcccatgaatcctaccaatctgaggaacaacgcatttgtcttctctgacaaaatacgggtgccacatattctgtaggaaaaggtggtgttgaggtcagaacttctctgtttctctgtctctctctctctggttctggaaatgttgagaatatgagtgaagggaaaaagatgggcaccacgtggaggcaatttcatggtggcatgaaacaattttgggggcatgaatgccatgggcagaacatcagggccccaaaagggaaatacacagtactttctttggacttcagtgctctcttttatagtaatggaaaccacaagcgcagaggaaggggagctgattctataaaaagaagtttatttcctactttaaaagatgattttttgactatcttcccacaatagagccagaggatcacaggggaaagctacgatcctcaattatagaaaatgatgttgggtgcatctagcatcacagaagctttagaggacacagtcatctcaggtacctacagataaggaagaagtaccaatgagagtacctactcgtattcttattcatggaagcgaatcccttcaggaaccaaatcatttagctgctggtagatgtttcttttggctcctctctctcctgagctctcaaacacagacttttttttctgtgtgcctctgcttttggcaactctgttccaagaataagaatatttgtttgtagatgagcttgctaggtcggggatctcttgtatagggagatggtgaatcactgagcaggacacagaggcatgagttgaaacagtgagatgtaccttagtttaaagagaggtcacaagagctcatggaccattattagataaactctaaattagaaaaaagaaccatatttctcttttgatagtcacataaaaattgaagccatactcattctaataaaaagtaacatgcatagctcttcattgcaaagctcatctattattcataacaggcatatagggtctatatcatttttacagaagtggaaatagcatgtaattactaatttagtttattcattagttttccaaaagtgaaataaagaattttccctttgacttcctacctggtaatttgaaagagataaatttgtgactaaaaagagtacttcacatcatacacaaataattaatgcaactgattgacccaagctagtgtgtgtgatattgtgatataataggaagtatatatttggtttctgaccctggttcctgcccttcagctcctaaaactcttggaatctccagagtgataagagtgtcttttgcatgctaatgaggtgactggtggctggggctggtcaccagaaagaccaaggcaggattagagggttgggattttcacccactcacaatctctggggagaagggaggggctgaaggttgagttgactgccaatggccaatggtttaatcaactcaccatgctgacataacaaagcctccattaaaacccaaaagggcagagtttggagagtttccagatagcagaacacggaaagatgcctggaggataggctcttgaagaaggtgtggaagctccgcactctttcccccatactttgtcctatgtgttttgtttttctttatcaatctgttcgtctgtatcctttgtcttatcctatgtaataaaccagtgtatgtaagtaagtgtttccctgagttctttgggctgctctagcaaattaattgaacctgaggaaaggtttgtgggaacctccaatctataattggatggtcagaagtacaggtgatagcaactggcatctgaagtgggaagggggcagttttgcatgactgatccctcaatctgtgggatctgatgctatttttaggtaaatagtatcagaattgaattgatttagaggaacccggtgtctgctggagaattgcttggtgtgggggaaaaatctccacatacctgatgtcagaagtaactgtgtaagacagaaggaaaaatgctttggagttttttgttttttctccccatctctatttatataggttaaaaatgtggctgggtgcatgcccatgatctgagcactttggaaggcccaggcaggaggataactagaggtcaggagttcaagaccagcctaggcaacacagtgagacccccccgcatctctaaaaaacaaacagagacaaatacataaataaatcagtacaagtacaagcctcataatccattatgaaagtgtcagagtgatgaatgccatgggcatagtaacagttaataaagaaaataatgtgttggaggaatatttaagataactgaggctgctacaagcaaaactacagaataatttcatcatatacatttttttttgtttccaaattagatacaagattaagccttgggtctccctggcagtggagggcgattctgatattcacatataactacccacagggcatggattctgagagatgctgataaaagaagttggtgtcttcttggcatttgtccccaaggatcttccaatacccagagaatctgcatttacacagatcatgctcccttgggagcttctcttgactgccccccacaccctcattcgtggcttttcctctttgatctcccacttcagtcctcacacctgtcaacactgtgcttattaccatgtggagtggttagaagatcttcccagagtcaagacatttccagggtcacccttctcttaggcatttcttggcacgactgtcctgaataaaggaaaggagatgaaggtgatgttgagaagcatctagagggctggagtcagggggaaccggctgaggctgttggatcaagttttagccactggtaaaagacctccaagctgcgaatgctattgccatctgtgtaaagtcgcctccgagattagaacatgccaaagactgaagaaagaggtctaggtagcataaagccatcatgtaattgaagtttcttccgtttccaaggacaggaagcgtgcaaatggctctgcgttctcagtaggggtggggctaagaagtgagcctgcaaatggtagtttgggcgaagacttgtgtgatgcatgcagggactcaaatttagtgtcctctgaacacaaacaccctctatgatccgggttaggtatcgctcctgtgaacgttcaaagaacacctttatattctgaggggacaccgttcatcatcagatcactgttgacggaagccaggtgacagctttgtatttcgtgttttcccctttagtaatgtaaaaatagaagttatttctcctttcttccaatgtaggatttttttttttgagagggtctctgtcacccaggctggagtgcagtgacacaaacacagctcactacatccttgacctcttgggttcagatggtcctcccgcctcagcctccttagtagctgggacgacaggcacattccaccggcccggctaatttctttttaaagtttttgtagagatagggctctcactatgttgcccagactggtcttgaactcctgagctcaagcgattctctcaccttggcctcccagagtgttgggattacaagcgcgagccaccacacccagcccagtgtaggaatgtttaattcctccacttgctatcaaagaaaactgctaactttcttatttcctaatttctctttttctatttgcttctccttaggttctgctcttgggtgctatctccttagttttgagaatatgaaggtttgtttagaaaaaaaaaagcagaaaaaattcactggaagatttcacatttgtatatatctttatgaaatgtgacagtgaagtgttagggtagagatatttgatctgattaccattaggataaaatcaaatctccttaccatgtcttacatgtgtacttgtccaatcttgtctcctataattgtccaaccaacccgttctgttccagcctcactggccttcttattctttcacgaagctcacactgtcctccagagccttgcactctcttttgcctggaatgctctcccagatcttaacatgataggaaaacaaaagacaactgtttgtcatgtctactacagtctcagccccatgaggcagagtccatgcccattttccttccatgcaacattcctggcacctagagagtgactgatgcataatggctggtaaaatatttgattaaaaaatattttagtgtatttcctcccccaaaatatacatacacaacagaggcagttattttgtctatatctttagcacattttaggcatttagtaaatttctgttgaatccatatggaattcttcagattgatctgtgaacactttagatttgaaaaaggagaaaatcataaaactaagggtaatggggagagagcaaaaccaaaggcagacatgggaagattctccttatacaaaatactttttccatgtctataatgaacccccaaattatctggatacttacaacagtggtagcaagggaatgtctcgttaatgcaggttctctattctcctcaattaatttcaggtccttaattgtgcatgacatatgaaacataaagggtgtttatttgctaatcaccagcattaattaattcaaagacttacctgagattctgtttgcgcaataaaaattaaaaagattactcagtaatacattgggagaggtgtaactggggcattaaaatacgaatgtgtgtctaattttcaaacatcataagtattttgaaagcacttatacataatcaattaatatatgttgttaactaaattcatatgaataatatgtgatataaattagtgttttgtattaatttcaagacaattagaaagagaatgtcaccatcactcttttgattcaatcaacagtccttagactggttccttgtaatgaatttaatgggttagtaaaagctgtgttatttgaaattatgtaattttgtttttttaatattttgctcaaatacttttcttattagtgtaaatgactgaagtattatgtaaattttaatactgattatctaaggtatatcattaaaacaaattatgagctgtgatcttgggcaaggtactcaaactgaaagatgttttccttatctgaaaatttagataataataattacctcatagtctgttaagaaaagcacatgtgataatatattttaatgtacaatatgtctggcacatattaaggtctaaaaaggataactgttactgttataccaataaatataataattttgataaatataatagtaatttaaatatattttttccaacatttattttaagttcaggggtacatgtgcaggatgtgcaggtttgttacataggtaaatgtgtgccatggtggtttgctgcacagatcatcccatcacctagttattaagcccagcatctgttagctattcttcctgatgctctccctcctcccatcccctacctccgacaggccccagtgtgtgttgttcccctccatgtgtccaagagttctcatcattcatctcccacctataatgagaactataaactcataattcagctcccacctataaatgagaacatatgatatttggttttctgttcctgtgttaatttgctaaggatggcctccagctccatccatgtccctgcaaagaacatgatcttattccttttcatggctacataatgcaccacattttctttatttagtctaccattgatgggcatttgggttgattccatgtctttgctattgtgaatagtgctgcaatgaacatatgcatgcatatgtcttttataatagagtaatttatattcttttggttatatacccagtaatgagattgctgggtcaaacagtatttctgtctctaggtctctgaggaattgccacactgtcttccacaatggttgaactagtttacactcccaccaacacaacctctccagcatctgttgttttttcactttttaatgataaccattcttactggtgtgagatggtatctcattacggttttggtttgcatttctctaatgatcagtgatattgagctttttttcatatgtttcatggccacatgtatgttttcttttgagaagtatgtgttcatgtcctttgcccattttttaatgggttttttcttgtaaatttaagttccttatagatgctgaattgtagatctttgtcagacgcatagattgaaaaattttctcccattctgtgggttgtctttttactgtgttggtagtttcttttgctgtgtagaagctctttactttaattagatcccatttgtcaatttttgcttttgttgcaattgtttttggcctcttcatcatgaaatctttgcccatgcctatgtcctgaatggtattgcctaggttttcttctagggtctttatagttttgggttttacatttaagtgtttaatccaacttgagttgatttttgtatatggtgtaaggaagaggtccagtttcaatcttctgcatatggctagccagttctcccagcaccatttattaaagagggaatcctttccccattgcttgtttttgtcagatttgttgaatatcagatgctagtaggtgtgtggtcttatttctgggttctgtattctgttccattggtctatatgtctgttcttgtaccagtaccatgctgttttagttactgtagccctgtagtatagtttgaagttgggtaatgtgatgccttcagctttgttctttttgcttaggattgccttggctcttcgagctctttttttggttccatgtgaattttaaaatagttttttaaaaattctttgaagaatgtcaatggtagtttaataagaatagcattaaatctataaattgctttgggtagtatggccattttcatgatattgattcttcctatccatgagtatggaatgtttttcactttgtttgtgtcatctctgatttctttgaagagtgatttgcagttttccttgaagaggttcttcacttaccttgttagctatattcctaggtattttattctatttgtggccaattgtgaatgggagatcatttgtgggtaatttaaatttttaaaatcaaatattttatcactcattatgcattattcttctctgggatagatagagatttcccagaactccgataagctttattttaacctatttacctctgattaatctgtttcacctcccggttgttactgtagtaactggggttattaatagcctcagagctaccaagacttctctgtaaaactgattatctttttcaggatagcatcctctaaatggttatgcaagatttatggttaagaatggaagtagctgattaaataattcaatgagctttactcaactatctacttttcacagcctctattttgtcccctgtggaagcacataacagggcttagctttggtgttgtagctctctgtcagaatacgcaattagtaggtctcatatataaaatttcatttcatcttaatattaatcccaccaaatggaagctatctaaactttaaagttaaaatgactgaggctaacagagaatatgtgatttgttgagggtcacaaacttaacgaattctccaactacgggacaaatgcatttttctcaaaatctgttaccttttatattatatcccagtgtctcatagtgccaagacaaggaaaaaatgaacaattcttagacaattatcttcttttccagggaatatctttccattttctttttcccatccctctcctaccctccccagctacagtcaaacctcaaatataagaaccagagaatttaaataaatgtcacaagaagaaacatcctgaatcgtgttcttcttctggttcctgaaacttccaaacatatcttcagcgttatcacaaagttcagtgatacttaggaataacctagtgctggacaccaagtagatgaccaatgaataatttttgtatttttagtagagacggggtttcacgatgttggccagtctggtctcgaactcctgacctcaggtgatccacccgccttggcctcccaaagtgctgggattacaggcatgagccaccgcacccggcccagaaacagatttcttatctgaaatatcagaaggcagaaaacaacaagagggaaaaaaggctgctaacttaacgcatggggaagcagggtgtgggcaggaaatgcagtgtaagagaggagatttgtacagggcgatggaagagacaatggagagaagacaatctgagcagaagctgtgaggagtagatagatgctggggaaagggactgctaattatggtgttattttaaaactagctttgtgtttaaaattctcattgcaacaccctcagagacctccactgcactgcaaaaatcttggatttatattttgtttatcttctggtgtaaaactgagctgaagcacactgattctactagaagaagtcaatgtcctaggaagacattgacagctgtagggatgttaactgggtcatcttcaccagtaggtggggacattgcactttaaaaattcaagggagctgctgctttcccttctctcctggccccttggcaggtctagatttgagggatcagcatttcttgagggtggtaacccagccactcttttttcccttactcttccttccatgtgttcaaaatatgatgcaatctgagatgtggttatgggtgtttgagaagcaaagaagcatgactggagcaggagttaaagtctgcttttgtttgagaactgaagagctcagtcttttacacgctttcacagataagagattggtactataaaattacatgcttaaaacaaacttcgctgctgtcattctaatgcaagccactatcctttttcacattgagcatcctgccaccatctgcagcattcttgatatttcagtaagaattaaattttattttgcaatcagtattttaaatttatcaggatacctgtatatagtttgaggattaaacaataaagatgtattttaatgaaaacaagagcccttcatgccattcctttcctccactagcattatccccaggtcaatgacttttaatggtaatatgtgtatctttgtgtatgtggggtattaatttagacatcagttatctaattatctgaaagcagataatttagaccaccaacaattttatgtctctggcatccttcttgcaattttattatattactatgtttagttcctctgtaggtaatccctgtatttaaaaaaaaaacaaagaaaacctacacctaagtatattgtatttaaactgtaaaaaaagttgaaatacataaatactgcttagaaaagcaaagtgggatgggaaaagtacaagttattacattttagtatatttcttaaaaatgaatataacaggtagatatttgttagtatgcattacaaaatttgggcaacatagttatgaagtatatttggatatttttcaatacatatattacacaaaggaagaaataaagtactgctcaaatcaatggattaaataacctagttgaaatattggaaagtagatgaacagtaattcacagaagaaactcaaatggaaaacagcatatgcaaagatggccaactttctctataatatttgacacagtaatattatgtcatttcagtttaaataaaattatacattgataaaaatgtgaaatcacgtctttgaggggttactaagaaactgtctagaagcattgttctagaagctgatgtggttttggaagatcaagtgtgaatgtccaaaggcacttctgttgaataaaacgccaagtggaggaattgaagatccctgattgtggaagtatccaactgtttagaactcaactgaaatcctgaatgatagttctctacatgtagcaggaggagcaagtgactcatggaaataacgggtttatttaaataaagatagcctttatgtggacatcaaattcatcaatgaatgtatccatttatttgtcaaataattatttagctcctactaagtgctacatgctattccagataacctagtcaaaaaggcaaatgtgtccctacctttatgagctttaattctagcaggaactaaaaaaagtcacataataaacagacataaaatgcagtgttaggttgtgattcttgctatgaagctacaaaagaggaaagctgagtaagggaataaagaaacaaagtgcttatcagtagtgaacttccatgcaggccatgacaggctcatttcaaaagaagcagaaatatttttattattgtttccttgggttattagtgtcacatgtaagaatagtgcactagatttactaccacagatttttgtacttatacgttattttgaacaaaataacaacgtctagatagttcctttcctcctgcaagaactaagtgtatgtaagtcctctcttttgtaatctagtttatttttttcacatgtgaggatcccagatactattaggatgccttcattgctaattggatcttggaaaatatactttcttgctttacaaaatatatttccttttaagcctcagagtaaattttgaaatgatctacccatggattagtcctctgattttaactagtatcattattctagctgtaaaggacatctattcaaactgtgtacaggtaagattatccagggggtatagtttagagcacccatataattttcaatagattatgtgattttacaagaatctatcaagttaatgtttcaagaatattgataattacttttagacgttttgctgaaaaaatacaaatagacagggagtccatagtaatagggtgggtctaaagttatgtagtctgagtgaggacatgggatgttaagtccagagacaggccatatgcagacagccagaacaatgtctcaaaatctacaaatggctgggcctggatcagtaattcttatgtgaaggatgccagaaatgagcaacgtaaaccttaacagagtctgaaaacacatctcaaggtagaggttagaatgaatccacctgccatcccagcctgatacacatgctagaatgggttatagaaatgggctaacaggaaaaaagtcattgaaatcatggaaaagaccgaaatgaaaaatgtgagataatataaaggtccatatatgttatttatttcagtaaaatgcaaatagacttgacttgtgatcaaaagacagagattgacaaattgaatgcaaaaatacaaattcagattatactgtttacaagacatatgtctaaagcataaaagtcatttcagagattgagtgtaaaagacagaaaggatatatcatgcaaatactaattttgaaaaatgatatcaatttattaatgtaaaaaacaaattttaaggaaaaaaggcattgtagatttttcttcatctctttattttgagcctgtgtgtcattgcatgtgagatgagtctcttgaagacagcataccaatacatcttggttctttatccagcttgtcactctgtgtcttttaattggggtatttagcccatttacatttaaggttagtattgatatgtgtggatttactcctgtcatcatgatgttagctggttaatttgcagacttgtttatgtggttgctttatagtgtttttgtagtggctggtaacagtctttccttttcatatttagtgcttccttcagaagctcttgtaaggtaggtttggtggtaatgaatttgctcagcatttgcctgtctgaaaaggatcttatttctccttcaatatgaggcttcatttggccaattatgaaactctgagttggaatttcttttctttatgaatattgaatattggcctccaatctcttctgcttgtagggttttagctgagaggtctgctgttagtctgatggacttccctttgtaggtgacctgatctttctctctagttgtttttattttttattttttaacattttttctttcattttgaccttggggaagctgataattgtgtgtcttggggataaaagtcttgtgaagtatcttattggggttctctacatttcctgaatttgaatgttggcctctctagctagattggggaagttctcatggatgatatcctgaactatgttttccaagttggttccattctctccatctctttcagggacaccaatcagtcatagatgtggtgtctttacataaccccatatttctcagaggttttgttcatcattggggaagacagtgtggagattcttcaaagacctaaagacagaaataccattcaacccagcaatcttattactgggtatatacccaaaggaatataaatctttctgttataaaggcacatgcatgtatatgttcattgcagcatattcacaatagcaaagacatggaatcaacctaaatgcccatcaatgatagactagataaataaaatgtggtacatatacaccatggaatactatgcagccataaagaaacaaaatcatgtcctttgcagagacatggatgaagctgaaagtcattatccctagcaaactaatgggggaacagaaaactgaatactgtatgtcctcacttataaataggagctaaattatgagaacacatgaattcataaaggaaaacaacacacactggggcctatcagagggtggagagtgggaagagggagaggatcaggaaaaataactaataagtactaggcttaataactgtttgacaaaataatctgtacaacaaacctccatgacacaggttacctatgtaacaaaactgcacatgtaccccgaacttaaaataatagttaagaaaagaaaacaggccgggcacggtggctcacgcctgtaatcccagcactttgggaggccgagacgggcggatcacgaggtcaggagatcgagactatcctggctgacacagtgaaaccccgtctctactaaaaatacaaaaaattagccgggcatggtggtgcccgcctgtagtcccagctactcgggaggctgaggcaggagaatggcgtgaacccgggaggcggagcttgcagtgagccgagatcgcgccactgcgctccagcctgggcgacagagcgaaactccgtctcaaaaaaaaaaaaaaaaaaaaaaagaaaacaaacaaacaaaaagcaaattaaaaataaaagctatggttgaatcaatgatgacattgaggaataaaacaagcattaggatcatgacattagcacaaagccattcatgagggatctgcccccatggtctaaacatctcccattaggccctgcctccaacattggggatcaaatttcaacatgagatttggagtggacaaatatccaaactgtggatgggaatgcatgtggaagaaatacttaatacaattgcatttaaaaagtagagagggtaaaatatgctaatggtactagagatacggactgtatccttcactcaaagtggtaaaacatcaataccagtagactgtgataagttatatgtatatattgtaataagtacaaccaccaccaagaaagctatatgaagcaatgtactaaaaaggattaaaaagtatgagtgtagatacaaaagttcttcctgagaacttcaaataagatagatatgcatatggtgagtagggctgaagtcttgacttctatgcctgaaagtaggcattattggctgggaatttaattcctaagtgggaaagaaaccaaaagtgctctatggaggaaagacagccaaattttgactttctgcttctggctaggagctgaggttgggctccccatgattttaaaggaggttgaggagaatgttttcaaacacttgtatgctatagatataaggaagtgagaagacacagaataactttctcaaaaggaactgaagcaaataaaaaacaactgtcctgagaagattgttattgttccagatattacaacaggacaataaatctgaatgatcactgaagaactgggattttgattggaagcctgatgggctgaggtggagtggctaaataaaacctctggacagggacagtggagtacagaaaagaagaggagggaggagagtaaaagagatgggcaatgctatggtttgaatgtttattttctctgaaactcatattgaaacttaatccccatagtaatagtattaagagggctgtaaatccaactatggtatttgagaggtggcacctttgggaagtaattaggattagatgaggtcttgagggtggggcattgagaggagaaacagagaccttgagccatacccctttgccctcttgtcacatgatgctctgcacctcatcagaactcagcagagggcccaccaataagaagactctcaccagatgctggcaccatgctctgggacttctcatcctccagaatcataagagatacattttgtttcttcataaattacccaatttttggcattctgttacaagcaacaagaaacagactaaggcagaaaattggtactaaaaagttgggctgttgctaataacaaatatctgaaaatgtggaagcagctgtggaactgggtaatgggtagaggttaaaagaactcaaaaaggcaggcgagaaaaagcctgtattgccttaaatgtcaattctggtgataaagggtgattttggtgagggcttagaagaagtcaagaagactaggaaaagtctggaactcctttgtgatgatttgagtggtcaggaccagaatgtcaatagaaatatggacagtaagggctgttctgctgaggtctcaggtctgaggaacaaggaattggaaactggagtaaaggccatccttgtaataaatgggtgaaaaacttggctctgaattgtgtctatatctgatggttttattaggctatatggcagaagaaatatctaagcagcaaagcagtcaggcagctgcatggctacttttaactgcttacattaaagctgtgagaggtaaaaaataacttaaaggtggaatttataattaaaagggaagctaagtggaaagattaggaaattttgcagcctggccctgaaagagcattttcaacagaggaaaccaagggtgtgtctgaaggaatgattgttaaggagggactgattgataaggagaattgtatgaatagaataaagccagaagctattcatcaagacaatgggagacaaacactgaatgcactttagagatcttcaagtctacccctgccatcacaggcccagagctctaggaggaaagaatggtttcaggagacaggcctggggtgtcctccatgggcttgctgcccaatgccacctcagggcagtgcttccctcatcctggttgctccagccatagctcaagtggccccagatgtgactcatattgtagctgcagaaggcacaagcagtaagccttggcaatgtccacatgcatgtggtgctatttctgcaggtcttcagaatgcaagactagtgggaaggcatagaaatctccacctagatttcaaaggatgtatcagactgcctgggaacccaaggagaaaactgccacaggggcagggccaccactgtggggaaaagcaagagggatcagattgttactgtgtctgtgtagaaagaagtagacataggagactccattttgttctgcactaagaaaaattcttctgccttgagatgctgttaatctatgaccttacccccaacaccgtgctctctgaaacatgtgctgtgtcgaactcagggttaaatggattaagggttgtgcaagatgtgctttgttaaacagatgcttgaaggcagcatgctccttaagagtcatcaccactccctaatctcaagtacccagggacacaaacactgcggaaggctgcagggacctctgcctaggaaagccaggtattgtccaaggtttctccccatgggatagtctgaaatatggcctcgtgggaagggaaagacctgaccgtcccccagcccgacacccgtaaagggtctgtgctgaggaggattagtataagaggaagacatgcctcttgcagttgagacaagaggaaggcatctgtctcctgcccatccctgggcaatggaatgtctcggtataaaacccgattgtacgttccatctactgagatagggaaaaaccgccttaagactggaggtgagacatgcaggcagcaatactgctttgtaaagcattgagatgtttatgtgtatgcatatctagagcacagcacttgattctttaccttgtctatgatgcaaagacctttgttcacgtgtttgtctgctgaccctctccccactattgtcttgtgaccctgacacatccccctctctgagaaacacccacgaatgatcaataaatatgaagggaactcagaagccggcgggatcctccatatgctgaacgctggtcccctgggtccccttatttctttctctatactttgtctctgtgtctttttcttttccaagtctctcgttccacctaacgagaaacacccacaggtgtggaggggcgacccaccccttcaaccaccaagagcctctgctagggcaatgctgagaggaactgtggggttggaactgctacagggagtcctccccagggaaatatctagtggtgctgtgacagtgggactgccaccaagactccaaaactgtagagctaccagcatgcagtcccagcttcgaaaacccaaggcacctgactccaacccatgagaacagccatatatgggctgcaaccagcaaagccatgagggcagggttgcctgaggtcttgggggcccaacttctgcccctgtgtgctcaggatgaggaacatggagtcaaaagacattatttccagctttaaaatttaatgtctttccctgttgagtttcagacttccttgaggcctgttacttctttcttctggcccatttctcctgtcccagcattgtatcttggaggtagataattggctttagtatctcaggctcacagataaggactttggacttttggacttttgagttggtactagagaaagttaagactttggggctctggagataaaatgaatgtatttgaatgtgagaagaatatgagttttgaggctgcaggggtgaaatgctatggtttgaaagtttgctcctctaaatcttatgtagaaacttaatccctattgtaacagtataaaagggtaagaaaacagaccatgatattttaggggtgggagatgtgagaagtaattagtattagatgaggtcatgaggatggggtgatgggttactaagggtttgataagaggagaaagagatacttgaggtagccctctcagcctgcttgctatgtgatgccttgcaccacaatgggactctgcagagggtccccactagcaaggaggctctcaccagatgctggcaccatgctcttggacttcccagcctccagaaataaattttgattctttataaattacccagtttcaggtattctattgcaatcatcaggaaattaattaacacagcaaaatcgacatctagaatacaaaataatcccagcactttgggaggccgaggcaggcggattacctgagttcaggagtttgagaccagcctggccaacatggggaaaccctgtctctactaaaaatacaaaaattagccgggtgtggtggtacatgcctgtaatcccagctactcaggaggctgaggcaggagaatcgcttcaacccaggagatggaagttgcagagtgagccaagattgtgccactgcactccagcctgggcaatggagtaagactctgtctcaaaaaaaataataataatatacagtaattggagatgaaattaatttaagtgttctggtatatactatgtaagtatatgaagtataaataagtagagtgcagatgacaccaataacaatgacttcattgctattctgtctcagtgaagaaggggtcctgtaggtatgattaattattctcttaggtgtgtcttctcaatgccagcaaagctaggtgtgggtgaaaaaaataccacctagtcttttttgttaagtgactataaatatcatcagatccctgtgcttccctgtctctatccccagggattcaatgacatttatacacttggttcccaggtgagattttaattaataaactaatctcatgactgttagcaattataattagatattctgtcaagttcctaattctcacatcttcaagtcctgtaatttggtatgaaggcactgcgaatttggactttgagctaacaagatttagacaggatattggccttgatctgaggctgtaatggaatgagactttggggggcccttgagaagggattaatgtattttacatttgagagggacatgaattacaggtggccagagggctgaagaggtgagaaggaaagcagaattctaagatggcccccaggaatatctatcaccccctgttgtacataccttataaaattattttcctttaaatgtgggtggaacctaccgagaccagcttcgtcagggagaccctaacccagcagcgctagaggaattaaagacacacacacagaaatgtagaggtgtgaagtgggaaatcagggatctcacagccttcagagctgagagccctgaacagagatttactcacatatttattaatagcaaaccagtcattagcattgtttctatagatattaaattaactaaaagtattcctatgggaaacgaagggatgggctgaattaattgcagcaggaacatgctcttaagacatagattgctcatgcttttgtttgtggcttaagaatgcctttaagtggttttctgccttgggcaggccaggtgttccttgccctcattcccgtaaacccacaaccttccagcttgggcgttaaggccattatggacatgttacagtgctgcagagattttatttatggccagtttatggccataaactgggccataaatttggggccagtttatggccagattttggggggcttgctcccaatagtaaccagtaaatttaatggtatgatcactactgtgattgggttatgttttgactgcaattagccttatgaaaaggaaattattgtaggtgagcatgaactaattaggtgagcccttgaaagggactgaacttttcttgaagagggagattaaacatgagaaagactctgtattactgactttgaagatgtagagggccatgtggcaaggaactgagagtggtcactgggagctgatactgatccctggctgatagccggcttgaaaacatggacctcagtcatacgtggaaataaattctgtcaacaggcagtgagcttggaagaggactccatattcaaatgagaattataaggtcagcttgtgacttcagtcttgtgagatcctaagcagagagcccagttgagctttgcctagacttctgacctagaaaactgagataataaatgggtgttgttttaagctgcaaagtttctactaatttgttatgacagtggctagaaaattaatacaatatgctttgtttatttaaattttacatactgcaccataagcacctttgacataaacagaatgcttaaaattgatatacctttcacatattaattctttactttttcttagtatagtctaagaatactttcctgtacggtttctttctttgttttgttatttaaactcatctcaccactttttaataaaataaatatttactttttttttctatatttttgttgatggctttcatgaaacttcggttcttgtcttcttagtttaaaagaatttaaacaacagacacacagcaaaggagatacaacatagagcaatttcttgcaaaggagaaaggatactctgaaagttaggtgcagaatcaacagtacaccccaagagacaattcagggcaggttgcttgtgcgggtgagacagtgttgaatgttactggggaaactccctttatgggagtcttacatgattattcataagggggtgggaagatgtgttactagcaagcatgttctgggtggttcctcctcagttctgagttccttctcatttaaacttttaatctgcctcagtataatctctgtatgtgtgtatgtatgggctctttttactatcccactaactcactaattgacccaacactatttttagtaatttttcctattccactggattaaaagtttgctttattatgcactacattcttaatttatccaacataaatgcaggataacttgttctatccttgaaagcagtcccagtatgatgttctttagagaggccagagcaaatttccccatactccatttcaaatacttcaaattatattgcaacctcttgaaaaatatcaaattaggattgtatttctaacaccaagaaaaatgatttaaaattcttttaaaatagcttcttgtcctaaaaatctcaccataatttcctcatcactatgctgctttctctttcattccatattggtgtcatgacaatcaagtatatttcaaaaaacttgtttccggaccccttacatcccactgagttccattcctcattagctacagcccattaccctacaaatttggatagactccagaagagtagagtgggcccttatgtactttgaagaagtgaagaatataacctgtaacattgaaggcttcttagaaatatgtttgtctcccatcccaaaattttctcaaagggtttgcgacttcctagaaatgtaatacagtggtcctcccttatcgatggtttcactttccacagtttcagttactggtggtcaatcaatcacagtgtgaaaatataggtgtttagtacaataagatattttgagaagaggggagagagaaagagacagagaaagagagagagagatctcatttacataacttttattacagtatattgttataattgttctattttattattagttattgttgttaacctatgactgcacaatttgtaaattaaactatatcatatgtttgtatgtgtagaaaaacatagcatatacagagtttggtacatgccttcaggcatcctttggggtgccttgcaacatatctcccatggataagagggggctattgtaaacaaaattttcaatttcattaattgtggcataaattaggttctgtttatgtgcagccaatatcattccacagttgtcctttttttggggcactatgaacatgttttaattgtttagctttataatcatttgtaaacatctattagagtacctctccttatttttatcaatagttgtttttgtataccgctcttgaaagttagaaacattttgttaataaaactgtcttattactatttagattaaagcatcaccaaatccatgtattttgtctggaaaagtgacacaaattgccctgtccaagaaagtggtatcattgtttactaaacttctttctgtccttaagtaaatttctattcttttctgtggattgcacacatgactgctttgatattttgtatatttattgctcttttcaataattttttttctggaatggattcattgacctaatctgccagagagaattaatgaggccccacatcttctcattagttggagaagaaagtatttaatggtttaacttgaacgtgacttttgtgaatcttttttttttttttttttaaagcagaatcctgtatttggttacattctggtctagtgaccacttccttcaggtaaagcaagcttccctgtctggaacagccaggcatgtgataaaaaatttcctttgtggtcacttagttattattcctcttgtcttgagtgtctgggctgctattttcatgtatttacatccaaatgaagtctttctttccaactttttatagtatgttttgattcacaaaatattttagccttatctacaatataataatttctcacaaatgcaaagaatataggtttgtacagttttgaagtaatattggcaaaagagtatgaagcagagtgcccatatttaaatataactttcaacatgttagtctttctataggtgttttcaggataataaaaattaatttgattgatatagacttgggggcaatatatgagaaacaggctctgctctaaaggataggatgagaggtgggcagggaggatttgtatggtttgaattccaggcacacacgctaactgctaatttggcatcatccaccaggttgaatattttcatgaaattctgtcttacatctctgctaatcctaaaacaaagaatgaggatcatttcaggtgagtctaagtcaggagaaactattaaaattgttatattcttcatttaatttttttctatgattattttttcttctttttatactaattagaataggccaaactgctgcaacaaatagactaaaatgtgtattgtggctgaaatatagtagaagtttataactcactaatgtagcagaaggaggatattgaagatttgtgagtcacttttctccaggtggtgattcagaattccaagctcccatagtccaatatggtgcctttcattttttttcctgagaaaattaacacattttaatttttcctcaagaagggaggtacaagagtgatcaattgtgatctagaagattaaggcaagaaagttagtgaaatttgctacagtgtctactattatagttgtcattatgactgtaactaatatttgtttccctccttcacaagccattcttgattcccctcatcctctgaatttagtctagtttgtttttctgttttggtgacagagacaactattccagaagggtctatgttactatttactctgttcttgaattatgattgttttagtgtctactgacagacatgaccatgcatagaagcactaaaagactattgtattttcatctgggatagtagtctctgtcactaaaccagaagaacaacctagtttttagacctgttcaagcttggttccaaaggaaccacttctgctgcagatggattgtggttggtatccccaaacttacgactccatggatttatagctcttcgcatcatatggtcaatttaaggcacatggtcagtgtgctaagtgcctatcaggaagaaatgaacacttggtcatagttttagaactatgaaaggaaattaaatcttgggactccaactcattaagcctaagggaaaagttaatctgggaacggggttgcgaaaacccgcctccccctttttggttcctaaataagatggctacaaaatgaaaagctacatgcctccctcatattttgtccacaaggaaagtccttgtgagctgcaagatctttactctaaggtgtttctgttaaaattttaccatggcaatgtaaattggtagcttatctttacaggtgtagtcacgcccctgcccagaagacacaaatgcatatcttttttttttttctttttttttttttgagacggagtctcgctttgtcatgctggctggagtgcagtggcgcgatcttggctcactgcaacctccacctcccgggttcaagtgattctcctgcctcagcctcccaagtagctgagattacaggcatctgccaccatgcctggctaattttttttttttgtacttttagtagagacagggtttcaccatgttggccaggcctgtttcaaactcctgaccccaagtgatctgcctgcctcagcatccccaaatgctaggattacaggcatgagccaccgcgcccggccacaaacgcatatctaattgttccccttcccccgttttgtctatgtcatcttatgtaaaaaaaatgcagattaactgagccagacaaaggcatgaatgactatttttccttaccctcctcttacatgaaaattgtgtacttctcaatatccctaccctttccccttaaatttagagccctcaaaattatcttcggagaaaggtatagacctgtctcctgggtgcttattcttaactttggcaaataaacctcctaaaatgattgagacttgccatttttctcgattgacagaacacatgagttcatgcaaagttactgttggagaagttttcctgtggttgttttttggaacatgtaatatgaatgaagtgatcaagagtttgagctgtgacttacactttaggctataatagagtaattggtgcggttaagacttcatctctcctgggcagctttcttgagctttaggagactgactcacaatggagctgaggcttcttctgtcccttgctactgatctgtaagtaataaaactgcttcacataatttgtgtgtgagtgtgttctgtttcaccagactcagataaacaggtagccagtgcatggtggacataaacagtagctcagaatgcagtgggaagaagtatctggacctcttttcctggtggttggcatagtgatgatcttttctattctccatgcagtggaagtcctccctttcctcccttggtattggtaattagtaaacctgcttcataaactgtgattaatatactaaaatctctaatggaaaaggtagacaacatgcaagattagacagtttcagcagagatatgaaagctttaaggatgaatgaaatggaaataaaataaaaataaattaacaaaaataaagaatgcatttgacaagctcatcagcaaatgtggtacagccctgggaagaatcagtgagtttgaaatagatcaataaaaattacccagagtgaaacacaaagagagaaagagagtaaaagtacattaaaaaaataagcctggcacaatgtttcacatctgtaatctcagcactttgggaggctgaggtgggaggaatgcttgaacctaaagagcagcctgggcaacataaggagaccttgtctacaaagagagaaaaattaagtgggcaagcatggtgctggtattcccagctactcaagaggctaagacgggaggactgcctgagttgggggcgagggtgggggatgaagtgagctgtgatcgcaccactgcattccagcctgggcaacagagtgacaccctgtctcaaaacaaacaaacaaacaaacaaacaaacaaaggtgatgtaaccattcaatacagcactgcagctcttggatgctctgttttgtttttcccctgctcttcttttctctttgtatttcacattgggtaatttttattaggtatcttattgaattagtttgttaaaagataaacacattatttcggttggctttgcttttttaacattatattttgaaataattgtagattcaaagggagttaccaagatagaacaaaaagattctgtatagccttcatccagttttccccaattgtaacatcttacataactaaagtgcaatatcaaaaccaggaaattatcctgacatatatagtcaaacgattttcaacaggagtgccagggccattaaatgcggaaaggacagccttttcaacaatggtgctgggaaaactggaagtccacatacaaaagaatgaaactggactcttaccctacattatagacaaaatgaactcaaaatgaatcaaagacctaaatgtgaaaactaaaaccataaaactcttagaaaaaaaatagggaaaatcttcatgatatttgattaggcaatgatttcttggatataacaccgagggcataggcaagaaatgaaaaaaatatatataaattggactccatcaaaatttacaacttctaattgaggcatggaaaactaaataccatatgttttgatttgtaagtaggagctaagtgggtactaagctatgggtactcaaaggcatacagaatggtataaaggacaatggagagtaagaaattggggaggatgggaaggagggtgaaggataaaaaactacatattgagtacaatgcacactactcaggtaacaggttcactaaaattccaggcttcaccactatacaattcatccatataacaaaaaaccacttgtaacctaaaagctattgaattaaattatattaaaattaaaaaattattattgagcatctactatgtgttcaaactattttagatgctatatatttgccacttcatttaatccttggcattactctatggaatagataatattctcattttgcagttaaagaaactcatactcagagagattaacttggatttatgagcaatgttgacattataaagtagaggcaggaagaccagttaggatgcttttgcagaaattaacttgagtggaattgtcggtctgtgagaatagaaaatgaatcttttgggaagattctacaatgttattgtttttgcataagtgactttttcctctactccctcttttcacatgtaaaatgtagatttactgaggctaatcagactcacaagaatgtaaccacttgtgtcattgcctaccttccctccttttttttttttttttcctctctctttcccttcctgcttactctttctttttaaacattgaagttctcaaaaccctctttggaataagcattgatcacagatgctcctgtgattcgtgtttttcccaggtgcatcctgaaccttggcaaaataaacctctaattgattgagacctgcctcagtcacttttcggcttacaccaggatttctttctttttaaagcctgaatagaattccattgtgtatacatacattatctttacccattcatctgctgaatgacacaggttgatttcataccttgactattgtgcataatgctgcaatgaacatgggagtgtggatatattttcaacctactgatttaaaatcctttgtctgtatcctggaagtgggattgctacatcatatggcagttctattttaactttttgaagaaccttcataatgttttccctagtggccatactaatttacattcccaccaacagtgtgcaaatgttcccttatctccacgtccttgttaacacttgttattttttgtctttttgataatagtcatcctgaaaagcatggattgatatgtcattgaggtttaaattgaatatcttaagttttcctatttgaggatatgagtagtccccccaaaatattactactaatgttgcttttttgcatgaaccatgaccttgagctgagctggacacttgaattcttgagtacttggacatgagcttaaataggactgaaatattttttacatacctgaatattagttcttctctctactggtaagaacttgtagaagaagacattataaagatctcatagaaagatatttaaggtttgtctgggaatgaaggcacatgatgactacaaatctagaagctggggaagagttgtctctggaaatatcccaggcattactagggaaccagaagtagagacgaacagatatgttgcaaagagtgacatgtgtaggttagctctgggtgatgaaatcgtcagtggtccagctgaggtgatgcatggatgagattgactggaagaagaaacctgtagaaacagatcaggaaacaaagctccgttgtacacacgtccatagcaggcagcctgggttttcatcccagtcttcttctgttttcaagggccatttccatactgcatgagaagccatgagactggtgggctctggactcctgtgccagagatcactcaccttccccatttcccccaagtgtcccaaatgccttgtatcatctgattttctatcttcctgctaaagcttttcccatactcctagtccttcaccctgcggtatcctccaagtccttacctgacttccactatggagtctccccatggttacttgcttgaaggaggcactgtttgagcacagcctctgaatgctacagactctctcttcagattttctaaattgtcattttaaagagataactgtttaaagagaaaaggcctaccttatatgtgtcatgaaaaattcatgtaaccggttacctaaaagttgatataagagaaatatgtaagtagcttcacaaggttttgaaaaatttggagataattacttgataaatttttattaaaggaaaatgatattctggggctgtatttctgttaccactggcattaaggaggccacagaacctttctgactctacagtgtttcttgattctggaagtaattgcaggacagagtcctggataacccttctggtgacaggatgactcctgtgtttacattcaactgcactgaccaagcacagattctaagagatgctgaccagggaagatgatttctcccttgattccacaaagaaggagtccacaacctttttctgccctgaaagaagagacaatgtgccctggggagtctccctagtgtaaccttgacccgtaataacagcagtgtctttatcccatcttcccacatggggtgtgtgtggtctcatcctaagcgctctgtccccatcagaggccgggcaggtgatttgggtgaggcattcagaatcaggatgcttgtctgagttgccttcctctggccaggccaatagtggctgccctgagtaatggagcagggataggaacattgcaaagaactgtagagaaggctggatcagggggacacaactggcagaagccccaaaccaaagccttttagattaggtgttttttttttgttgttgttttgttttgagacagagttttgttcttgtcccccaggctggagtgcaatggagtgcaatggtgcgaactcagctcactgcaacctctgcctcctgggttcaagcgattcgcctgcctcagcctactgagtaattgagattacaggcatgcaccaccacactcggctaattttttttatttttggtagagacgggtttcaccatgttggccaggctggtctcaaattcctgacctcaagtgatctgcctgccttggcctcctgaagcgctagaaaattacaggggtgagccactgcgcctggcctcagatgaggttttagccagtcagaaaatggctctaagctgacactttcgttgctagttgaaaagtctgtgtggccaggtgtggtggctcacacctataatcccagtgctttgggaggccgaggtgggaggattgcttgaggccaggacattgaaaccaacctgggcaacatagcaaaaccctatttctataaaaatttttttaaaaattagacagaatggcggtgtgtgcctgtactcccagctacttgggaggctcagacaggaggatcacttgagcctaagaggttgaggctgcagtgtgccatgatcatgccagtgtactccagcctaggtgatagagccagaccctgtccctaaaaaagaaaagaaaagaaaaaaggaaaataaaaaaaaaggaaaagaaaagaaaaaagtctgtttgaagaggcccatgagactggggagtccctaggtttgacgtagactttgcctcacagccccagaataaacctgagggaagtttctccctttgaacaggaagaaggggtgggccagaggcctctattccgagggacgctgaggtggggactgagaggacattgagggcatcttcaggtccctctctgcctattctttcttgcccccagttccgttctaggtctgagtttgatgttcctcctttatgcttccatcgcaccagtggagaccctccttagactgggggttaccctgatcctgagtacaccactgctgctagaagcccagtaacaacgttcccagtctcaggtgatctaaatctatgcacagaataatacagaatattagagtggctcaatgctttcatgtgccactattgcaaacctcttgctaccgtctcttccctgtttctttttacctggtaaacatattctgcttttagatgctctctatcttctactttactaatatacagggaagagtgggaggaagggagacaagaagagaggtggagatatttattgtcttggttaggattaccagtaatgtttgtcaggcattgttttaattgctttataaccattagtactatccctagccatgggcaacgtaagcctgataagtaagaaatttatttataaaaacacattggtacctctgccattttggatttgatgtttagggctggcccaatatgacctgtaactctaaacatttgctccatcattaatacgattcagcccccaggaaattcttcttcacagcttttgttctctatcttcaaaactaaatgtgactgtgtctgaatactgtaaaatttgtgtattgtgcctttgctcatatcagatgcacctgtttcatggttcagggaggatttaagcagctgaagaacttacaagagaaaagtcaacaaatactttcactcgaagagcatgaatgcaataccttcttgcataataaagaatcacttgccagtagggctgggtgtcaacttttttttttcttgttcctcctattagcttgatagttacacataacagtggaggaggcttttgtaatattaaactagtcatattaatgttaaatttgtatatgtgaagatctagatgtaaaatgcataaaacatgatccacattttgcaaagagaagcctgggggtgaaaaggagttcagtaatttgttgactctcataaagcacattagtggtagaactgcaactcaccatcatttccttctaagaactttgctcttctcaccaaaacttaaggctcctcagagtgtctaatagaagtgaacatttctgtgacaattttctgttccctgaaatatgatcctcacttaatttgccctactaaaactcccaagtataagaacaataggttgtaagatgtctactcttgaatcacatttgtcttttgcttcttaaaacccctaagccattcaatcttcagctattcagaaatcttcacctcaaatgttcatctagtgcaatttgaagaagaaacagtgccaggcattggagtgagaatcttcacagaaaaatgtctgcccagaggcagatgaggtccttcagctccagtgctgattggttcctttcctagggactccccaatcctaccacacatggaaacatccagaggtttttattctttccggcaggtacataagatccattaggtttgagctgtgttgactaccactgctttttccttggtctcacttatgtcttggaagatggctctgcagatccctggaggcttttgggcagcagctgtgaccgtgatgctggtgatgctgagcaccccagtggctgaggccagagactttcccagtaagtgcagggcagctgctctcgagagccaccactgtgggaacaggctctccttgggttggagtatgggggatggtgatctccatgatctcagaacacagtcttttatcaccatttattctttttgggaaatagagctatgttgcatttttatttccaccttataatgggtgaggtgaggataatccaaccccaatcccacaggtttaagcctgaaggaggagagaggaaagaggagacaaagtgtgcattcactacctgtgacaggacaaaatgaccatggcactccacggttatgcatttccccaaagatatgcatttccccaaagacacagtaggatttttctgcactgggaaaatgtaaggcagcaatggtgtctgtagtctctgtattggaggtaaaggagtctatactactgactcgagtggagagtttgtggaggcaaactcttagtactgagggaaggtgactggatgaccacagacagggagtcttactttgggtttcactgatttatgggcaaaaggtgacttgagtgggattcagggacctgagttgatggtggactgaatttagtatgataggaaggaggaagtaaagaagggaaataatacatattgagaaaccactccattcagacacaggacagtactttctataaatcctctctcactcctcctaacatcctatgtgtaggtatcatgattttccttttatgtaattatacttgtgatatggatattctgttaagtaacctgcccaagctggtgattgactcagtttaattggaccctatagaattcaaaagcttgggctctttccatgaataaatgtttccttctaggactccggaggtgtaggtcctttctaacacagaagtgagtgaacctcacagggcacttgggcgggtatagcagaaagagagtaaatccaggcatgggtttacttggtctcttgcccagggaccaagagaatacttacatcaggatgagaacaagcttaattcctgaacctttctcgttattcccttgaactctcaaatttatgtggataactctgtctctgagattcccaagagctccatggaaaatgggatttcatacgagaacgccctgatctaagagcagaggtcaatgtcgaatcggtccgactgccctcttcacttggttcacaggctcaggcagggactgggctttccctcttacctccctaaaggaaggcagattcccgaggccctcagagagggcgggcagggctggggcagagatgtctcgaggatcccaggtccggagcacgaggcacgggcccagccaagaactcaatttcgcgtggacgggtttcgcagctgctggccgggtcagggcagcggctgaagggtgcggtccggctgggggctggggctagggccgtgctggggcctgactgacccgccgtgattctccgcagaggatttcttggtccagtttaagggcatgtgctacttcaccaacgggacagagcgcgtgcgcggtgtggccagatacatctataaccgcgaggagtacgggcgcttcgacagcgacgttggggagttccaggcggtgaccgagctggggcggagcatcgaggactggaacaactataaggacttcttggagcaggagcgggccgcggtggacaaggtgtgcagacacaactacgaggcggagctgcgcacgaccttgcagcggcaaggtgagcgtcgtcgtccttccgcggggctcacccttggccggggcccgagtctcttgcgcacggaggggcgaggacggcgcggcctcaaggaccgagccctgacccatcccagggtacaggaaggtagcggggatttggaggctggggtagtatcggaggggcggggatctagggcagagcagggggatgcacaaaagcatcccttagttccctgcagggttgggttaggctgcccagtgtgtccccagcctccccgtccatcggccttgtcctctgctctgcatgttcttgccttgtgccttatgcgtttgcctcctcgtgccttaccttcgctaagcagttctttctgcccgaatgcccgccctcttcccctgcccgtccgccccactagcactgccccacccagcaaggcccacttgcacagctcgcgccgcaggaagcttcaggcttggcctggtggagttagggctgctccacaactgcgcgcagggcatccagcaattacagttgtgaaataagatattttaacttttggcttcaaattattattcatcgtaattctgttttcttaaacggctctcattcatggcggagctctttgaggtgagagtgttttaatcattgcatgcctagtacctgactcgtggaccggcatgtggtatgagctcaatgatcttctgttaaattaatgaataaatgtactcagctgcccatccacttaggctcaagggaaagcagaggataaatagagccttaaagatggactttatcaattattttctattattttgcttaatgctgtaaactcttattgacttggatcttagtaaggtttgtgaatgcagtctggggaaaaaggtgtttgctgaaaataaaaacaacgcttgaatggtgttataaggcagttttaatttcttagaaaagctgaacaaatggcacaatgaaaagagcagaagctttggaatacatagattgaagccactaaattattgaataaaaatagtttcaggttgcttttggagtagattttctccctccccccatcactatccacttcgggcataaacattctgaacgtcaattttacccacttagtgagcacttatttctagacaattgccttagcaaacaccatctaagttatgtcatttaatagcacagttacctgtgcattagagattagcattgccactttatatatcgtaatattggtacatgataaacactttaagtaatcaacccacagttatgcactaggacctgaagcctcccccaaatacacagcattcttttatgttcttcaatactcgtctacacagcctaagggaagtaaagccttgttaaagccaattttgacaagaagcagcaatgggtctattcctgcctgttttcactgttaatgggacaaaatgatactttcaaggcattgaaaattcactgattaatcaatccctagtctgaccccagtgttatctatgcaggttcacaaaacttccttgccttcttctgacccacatcctaatgctgtcaattatttatatttttgccatttcaagtctatttctataaaagttattctatcatttttctcatgaatttgtgccctctatttttactttcagtcttttaagatgaacaaatcttgtaagtccccacatagctgactgttatttcagtcagactccaggaaggagggcctaaagaaaagttcaagtccaagcagaaaccaagattccttccagacaatggctcatgagtgccatttaattggggtgctacctgctgacctcagcaaatcccagctatatgtatatgtttgcattacaggcacattcacccaggccaacctctgcatggatctcagaatatttcctatggagaacgtacatgataatgtctgatttcagaacaagaaagtaattctcaatagcaaggggatggagtagggtaggcagctagtaattacactatcttgagggttaaaaggaaattaagaaaaagcaggaaaatgagagaacatattaccaagtaaataaagcatacattaaatatttactataattttacactaaagaaataaaggaaatgcagtaaaatggccagagaggtaaaggttaagatgtataaaatatgcagggaaaggtgtgtcatttttgaccatgagcagcgctctgagaagataaaggaattgagttatgggcaaacatgatgtttgatcagtgttagtttttttcaaggcctgcctacttttccttcaaatattacaaacttttgaaataacattcaattttttggtctctgttactagattgcaagttctataaaggcaggaaccagggtttgttgtttatttttggattctcagtgattgtcaaatttatatttgttgaaggaaccttaatccaagacttggactccaggtatctttctattctggttccaaggagggaccttcctcacagcaggcgtgctgtgtggtctcacatctcactcctatatctttccctgtctgttactgccctcagtggagcccacagtgaccatctccccatccaggacagaggccctcaaccaccacaacctgctggtctgctcagtgacagatttctatccagcccagatcaaagtccggtggtttcggaatgaccaggaggagacagccggtgttgtgtccacctccctcattaggaatggtgactggaccttccagattctggtgatgctggaaataactccccagcgtggagacatctacacctgccaagtggagcaccccagcctccagagccccatcaccgtggagtggcgtaaggggaaactggtttccttttactgtgggccccacaagacaaagggcagagctcccgctgatccttcccatcccatctcttgtccctgacatcactactgagctgggaatcacaggagactagagcacctgttgcccatggcaagcacatcagatgaatcctgatctctttgtctttccagatactagggagatcactttccacatttgtgttagtccattcttgtactgctacaaagaaatctctgagactgagtaatttataaagaaaagaggtttaattggctcttctcactccactataaagaaatacctgagaatgggtaatttataaagagaagaggtttaattggcttatgattctgaggctgtaggggaagcatagtggcttctgcttatggggagacatatggaagctcctaatcatggcagaaggaaaagagggagtgaggtgtctcacagggcaggggcaggagcatgagagagagggggttggtgctacgcagttttacataaccagatctatgagaactcactattgtaatgacagtactaagggagatggtgacaagaatctggtctaatgatccagtcacctcccaccaggctctacctccaacattgttaattacaattgaacatgaaatttgggtggggccacagaatcaaaccatatcaacactactaaagccccagaaccagctctgacagctatgagagactgacttagggctggtgactggggccttagggtttaaggttatggatgaagtcctgaggggcaggggtgtgcttcttcctctccctcacccacctattgtgtccaagacctactggctggtctttctcttccctagggtggtcagactggagaactagtgtcccctgacatctccacctcctgtaccaaggacattatggggtgtggggacaaacactcacactcagttctgctccttaggggctcagtctgaatctgcccagagcaagatgctgagtggcattggaggcttcgtgctggggctgatcttcctcgggctgggccttatcatccgtcacaggggtcagaaaggtgaggaaccccaagggaaaatggggaagatgagctgtgacccagaccctctattcagagaggttctgtctctagatgtagctctttcctccttaccctgagaggaagtgcgaggagacaggacaagattggaggaggcattggaatctgattttactgggtgaatggtagcgctgccagagctgactgatagagcttattccagggcgtccttaccgttcatcatcgtctcactggctcctttctaaaagcttcctccattatgagggtcagagcctcggcctccttgtcttctagtgacaatttcctttgttttgggggattttaacttagggtgcttaaggacttaaagaacatgggagggaagaggatataaccccaattaaactacatgtgtcattttcctttggggtaagatagtggttgtttgtttaacaagacctttctctgtataacttccttttgtaggacctcgagggcctccaccagcaggtaatatttcagccatgatccagtcaggggagagggcacaggcataagagggaagagccatggtgaaaccgcatctctactaaaaatacaaaaattagctggacgtggtggtgtgcatctgtaatcccggctacttgggaggttgaggcaagagaatcacttgaacccaggaggcagaggttgcagtgagccaagatgggccactgcactccagtctgggcgatagagctagagttgtctcaaaaaaaaaaaagaagagcatgagcgtagtgttccagggcacagtggtctctgttcatggcctgtttgctgctatgagggttaagacttaggggaaaagtttgccagtttctacgaatctccagagattgtttcctagaaccaggccttaactttggtggcatctttttgtgaaatgtggggacagagccacatcttgaatgtgagatagtagggtgatgcccactttgtgccacattttgttagctactgcctgtaggcattttcagtgactaaaagaggctgctagtggtggagatgaagtgtcacccaatttactaaaaaaatcaaactcttcatattacccagaagggtaactgctgttcccccacctccacatatctgcatcaagctgaagttctgtgtcctcatgagctgattttacctttacacagatattggggaacgtgatgatgatatgccctagacctcagcatcctctgtttgatgctacagagggaactgaggactaggggagagggtgtgtcctcagggtaccctgtgctgatcatgcctcgtctctcttctccaggactcctgcactgactcctgaggacttttgtctgggattggtcatcactcttctgtaatgcccacctgcccctgcccagaattcctagctgcctgtgtcaccctgtcccactgaggtcagagtcctacagtggctcatgcagccacaggtcaccttctgtgatccccatcccaaggcactggtggtgactctgcttcctgcactgacccagagcctctgcctgtgcactgcaagctgtgtctactcaggccccaaggggactctctgtttccattctccccccacagacctgtcaagagaagcatgacaaacaaaatcatttaccgactttagtgcttttttccataattaaaccgat

SEQ ID NO: 283 - DNA, 4518 bp, human
cgcgcggctgggagcggtagctgtgcctcggcgtccccgagctggtgccgagcgcagcgtcccaggagccccccatccccgcgccggcccacggtcacccgccatgtcgaccttgctggacattaagagcagcgtgctcaggcaggtgcaggtgtgcccgtccttccgccgcaggactgagcaggacccagggagtgccagcgccgacccgcaggagcctgccacgggggcctggaaacccggggatggcgtggagttctttgcccacatgcgcctcatgctgaagaagggggaaggcagacagggcttgccgtgcctcgaggtccccctgcgcagtggctcgccagcacccccggagcctgtggatcccagcctcggcctgagagccctggccccagaggaggtggagatgctctacgaggaggccctgtacacggtgctttaccgcgcgggtaccatgggccctgaccaggtggacgacgaggaggccctgctcagctatctccagcaggtgtttggcaccagccttgaggagcacactgaggccatcgagcgagtgaggaaggccaaggcccccacgtatgccctgaaagtctctgtcatgcgtgccaagaaccttctggccaaggaccccaacggcttcagcgacccatactgcatgctgggcatcctgcctgcctcggacgccacgcgggagccccgtgcacagaaggagcagcgcttcggcttccgcaagggcagcaagcgcggtggacccctgcctgccaagtgcatccaggtcaccgaggtgaagagcagcaccctgaaccccgtctggaaggagcacttcctcttcgagattgaggatgtgagcacggaccagctgcacctggacatctgggatcatgacgacgatgtatccctggtagaagcgtgcaggaagctgaatgaagtcatcggcctgaagggcatgggcaggtacttcaaacagatcgtcaagtcagcccgcgcaaacgggacagcaggacccaccgaggaccacaccgatgacttcctggggtgcctcaacatacctgtccgggaggtgcctgtggctggcgtcgaccgctggttcaagctggagccacgctccagtgcctcgcgtgtgcagggacactgccacctggttctcaagctgatcactacgcagagggatacggccatgagccagcgcgggcgatccggcttcctgtcccacctgctgctgctcagccatctgctgcggttggagcactcagcagaggagcccaactccagcagctggcgaggagagctcagcacaccagccgccaccatcctctgcctgcacggagcccagagcaacctgtcacccttgcagctggccgtgctgcactggcaggtcagcagccgccaccatcaaacctgcacgctggactacagctacctgctggggctgctggaggacatgcaggcacactgggaagaggctccttcactgccccaggagcaggaggagagcctggctgatagcctttccgccttctctgagttcgggctgcagctgctgcgccagctccgagactacttccctgccaccaacagcaccgctgtccaccgcctggagctgctgctgaagtgtctgggcaagctgcagctcttccaaccctcctttgagatctgccccttcgagtcggagctgaacatggacattgctgcggccctgaagagaggcaaccgtgagtggtacgacaggatcctgaatgacaagagtccccgagagcagccaggaccacagcgcctgcctgggctggttgtgctggctgacgccgtctatgatgaccttcagttctgctacagtgtgtacgccagcctcttccacagcatcctcaatgtggacgtcttcaccctgaccttccggcagctggagcgtctggtggctgaggaggcgtgggtgctgacggaggagctgagccccaagatgaccctggaggtggcctcggggctctttgagctctacctgaccctggctgacctccagcgcttctgggatagcatccctggccgggacagccgctctctggccctggctggcatccacgcccccttcctgcctgctgtgaagctctggttccaagtgctgagggaccaggccaagtggaggcttcagggagccgtggacatggacacgctggagcccgtggacgcctcctccaggcacagcagctccgcagccactgctggtctctgcctcagccacatccaggagttgtgggtgcgcctggcgtggcctgaccctgcccaggctcaggggctgggcacccagcttggccaggacgtgtgtgaggccaccctcttctatacggagctgcttcggaagaaggtggacactcagccaggggcggccggtgaagcagtgagcgaggcgctctgcgtggtcctcaacaatgtggagctcgtgcgcaaggctgctgggcaggccttgaagggcctggcatggccagagggggccacggggcccgagggggtgctcccccgccctctgctcagctgcacacaggccctggacgatgatctgcaacgggaggcccacacggtgacagcgcacctgacctctaagatggtgggcgacatccgcaagtatgtacagcacatcagtctctcgcctgactccatccagaacgatgaggccgtggccccgctcatgaagtacctggatgagaagctggccctgctgaacgcctcgctggtgaaggggaacctgagcagggtgctggaggccctgtgggagctactcctccaggccattctgcaggcgctgggtgcaaaccgtgacgtctctgctgatttctacagccgcttccatttcacgctggaggccctggtcagttttttccacgcagagggtcagggtttgcccctggagagcctgagggatggaagctacaagaggctgaaggaggagctgcggctgcacaaatgttccacccgcgagtgcatcgagcagttctacctggacaagctcaaacagaggaccctggagcagaaccggtttggacgcctgagcgtccgttgccattacgaggcggctgagcagcggctggccgtggaggtgctgcacgccgcggacctgctccccctggacgccaacggcttaagtgacccctttgtgatcgtggagctgggcccaccgcatctctttccactggtccgcagccagaggacccaggtgaagacccggacgctgcaccctgtatacgacgaactcttctacttttccgtgcctgccgaggcgtgccgccgccgcgcggcctgtgtgttgttcaccgtcatggaccacgactggctgtccaccaacgacttcgctggggaggcggccctcggcctaggtggcgtcactggtgtcgcccggccccaggtgggcgggggtgcaagggctgggcagcctgtcaccctgcacctgtgccggcccagagcccaggtgagatctgcgctgaggaggctggaaggccgcaccagcaaggaggcgcaggagttcgtgaagaaactcaaggagctggagaagtgcatggaggcggacccctgagtccatcagctgccagccccggccctggcccccaccccaagttccctgaagcatcctccagctcactgtggccagctttgtgcaaccagggcccacggcgcccctcctgtgctgtgacgtgtgtgtcgtggctggccccgcggcgcctaccgccctggccgtgtctgtctggtgtgtgctgtgaacccctgcacccaaccccacatctgggtggccaacttggcaggacttggccagcagctgcccaggacacagtgcaggccagagcgggcttgaccacctggtgggcctccctgcccgcttccttgggctccccggccctgggtgggcggtgcgcagctggtctccagggactcagtgagtggctgtgctctctgcacaacgggcaatgtgcagacgcatttttggtaatcacagctggggagtgaaaagggtgccactggcaccactgggtggatggtccagagcctccacccacagaggggatgcaaagggcaggtgagtcaagaaccgcataggtctccagtccccacggggctcccaggccggggaaaggttcccctgaggtcactctgaggccagggacgtcacccaaggctggtggtcagtgtgaagggctccgtgccaactggtcagctgtccttcacgcacatatccgtggccacctgagacctgctccacgacccttccaggcagagccgagagttcgccccaacccttccccaggcccagtgtgaaaaacagactcacaaggggcttcttggcctgcagcttcatttgcgagagcgccgaggcaggacacagagcacagctgtgctggaagtgtggggagaacccggacagctcagtcctgccagcagccgcaaagagccgaggctgccaggcccatttatgtccctcatgtctctagattttctcgtcacccagcctcaaaaatatatgtgtctgcaaccctc

SEQ ID NO: 284 - DNA, 35944 bp, human
gatcacgaagtcaggagatagagaccatcctggctaacacagtgaaatcccgtgtctactaaaaacataaaaaattagccgggtgtggtggcaggtgcctgtagtcccagctactcgggaggctgaggcgggagaatggcgtgaacctgggaggcaaagcttgcagtgacctgagatcatgctactgcactccagcctggacaacagagccagactctgtctcaaaaaaaaaaaaagaaagaaaagaaaagaaaaaaaagaaaaaccaaaggtaaagtggtaagatcttccacacctgaaccagtttgtagccaccagagcctgctgcgaaggggcccctcaagcatgcattcatcttgtcacctggaatttgagagatcaagaagccccatagcaacctaccatgcaactgcccatcagtgctgatcctttcaagggattatctcaattctgactctgcagacactggcagccacaggtgacaaaccctgtgtatctgtgggctttcctcatcacccagggccacaatggggtgcctgccctaggcagagacacagcaacattctcttaaactgaaattaagcataaatccacttcaccaataatcatctgagggctcagtccctgtctccttcctcggggattttaaaacacacatttctctgaccaaacaggtaggtgagatctgactttaaaggggggaaattgggttgaattgaggtatcaggaatggatcacaagtgtttttgtgtggggacaggcatccacatcccgaactgtacctggagatggagaaaaatgcaggagaggagaagagaaaaaaaggaggaaaaagtggctgaaagtatttgaaagcttctctcatggttctttctggctctggttgcttttccaaggtcttgagtgcaggcagggccagctctggctgggagctgctgctctgggacatggaagagtcacttcacctccagaaagttcattcgatcatctgtaaaatgggcaagcccataggtggttgtgatgataaaatgaaaaaaaaaattcttaacttacatgagttacatgctgtatagtaagttatgtgctatataggaagcacacagaaatgattcactgttatcataatagaaggacagtggcttggtgtgctaagcactaaatacaagccagaaaaaatgtcttagagaagtagacaaagaaatctatagttcagaaccaacagtaccaagaatgacatgtcctccaaattgagcttgggcaggtagatctgaacctatcctacacatctgagtctatgatatgaggtaatagtctccacctatagctatcttctctgcctgtgaggtcattcctttttgaagaaagctgacctcagactatactgtgatcatttaaggaagagcacaaaatactggagaaggctagtcttcaagctctagatacagaaaatcctcatattcttgggtgttccctttcagacagagaatcagagccacaagcactaatccagaaaccccctttcccaaaaacgttttccatctcctaccaaggttcacatccctattgagtgctcactagtgtctatagttgctagagcaagagtctctccttattctctaaggcaggagttctgtgaaggccccatgacaaggggacaaaatgaaacaacatgtttagggacaacacaggaaaaacccatattatcaaagctccaaaacctggctacctcaggcttggccagttattcatgagcagagaggtttctcatctacatggcagtcatggcctggatgggtctggaactgtggcaagataaggctctgagacaaggtgccaggagaaagatgaattcaatcatccatttctgccaggaagaaaagcaccaggaaggaatcagatgtacagtttgtcctctggggacctctgccttgatccgcaataaatctccttttagatgccacgtgcagcaattcccacactttacaatgctctccatggcttctgttggccttatggtcagctctgccaagatctgtattcttgggcaagacagaatccttctgaatctcagtctcttcctctataaatggaaacaatttggctctacacaaatcacaattagcatgtttgtgggaagttaaaccgtgaaactcagcatcaatgaaaagcaatgtaccactgttgcttatgaaaactcttgtaaagttgtcaggcaccatgcaccatctaagtacagcagtgttaggtataagcccatcagtgattagagggggtatggggtggagagggggtctctgagcagtgggtctccgggctctggggaagctggctgggtggccatactaggagctgaacccgaaggtactctgtgtgtcctctcaactccacgggccccactttggcattttctccaattccctctcgtttccatttgcttcctccctctagccccctggctgtgtccaatttcaacaccaagtttctgagcttttctcattttgttcactgtctccagaacatccctgcttcttttacctttcaaagaattcaaacttgaactctgctcactcctgcccatcaccaacctgagctcagagttcctgagaagggaaagcaccctcataaggaaactcctccttttcttacatcattagacttgagcacagacagcatttccatctccacactgctctggccaggttgtgcctcagtcaattacacaactgtgtctcagtagccttggtagggcccaaatcaggatattctttgggaagtttcactttgtactgagccaagcataatctcccgggatctaaaatagaaaattctagacccacccctccacatcttcgttattgaacccaatatgtcacccatttaccatgtgctcaaatctctacctactgctgattctcagatcaaatcgtaacccaggtttaccatggtccaaactctgacatctgattggggccatgtcatcctggttcaggctgtcagccccaagcaggtgggtcagtttgcctcaccctgagagcaggttgccagggcaaccatgaggctgcataaaaagaacctatgacaggatgcatatgagagagacaaatgtcttcacattgaagaaggggaggagtgcaccattggttttccatcctccagatgcactaagctcctacctaaactgtgccccctccttctttgaaacacatcccatccttaagccttggtaggaaggagagccatctggaagccctgaatcctatggaatgctgagtctcccttctccttaccccttagtgttggaattctcattccccaaagtcttggatttgaccttgcccgacactgactggagagaagcatcttcatattcacaggaatgagccttagatcagactttgctcctctcctgggagctccaggacactgaaaagccaagcttgttaccaatacttgcccttccttaagtacattaaatacatcccaaatagttaaacagattcctaaacagccaggccattctccctccttctaaccctcatctcctcggcctacgaaagcccagatgtgtgatccagggcttggcttcccctgtcttccccatcccagcatccttgcgggaaagggctgctctctctctctgctttcagaaggcaaatttccttatcacctatgagtcacaaacccagagagtggccaaacatagccaagctgatgcaagaccctgggaaggggaaagctgcaggtgtgtttgtgctgggaggagtgctgaccctcacctcagagacacctcctctccagatcctcaggaggtataaagacaggtcctccaccaccagtcaggcacactctaccaccatgaatccactcctgatccttgcctttgtgggagctgctggcgagtttcatgccatgcctcaggccccaaccaccccctttcctggcagacacttgccctgccattcttgccacctttcccattttgactgtgttctgatattctatttcctccatctctccttcccatcctccttcggctctctttaagcctcacctgtttcagcttctccatgatttcactcccaccactgtcattcatccatatctgagctgtggctggagaagctgggaagggagaccaggtggggcgggcccacaaaatgaagcagcagccttcaggcttggctccatagcaccagtatagcaccattatatctgctcttaacctcaaatgcacctggggaggttgaaaaattactcatatcagagactcagctttagaagttctaacttcattctctggggtgcaacctgtgtactgggcttttaacattcccgggtgatttttaacatttccatgcatgcagccaaggttaagaattgctgttctattggccaataacaatgtctacctttgttctgccaaagtgagcctgggggctgccctcaactctgccctgactacacaaatctgagctatgggggaagctggtcatggccaggtctacgcagccagggggttttcctagcttggccaaagtatactgacaatccagggctcaaatcgccaggggaagtacacaggtgatgaataaaagagagaagcactcagtgggtgagacaaccacatcccaattcctatcccactggaagcattgtgaggacattccttgaatcctcagcctggtgaccccggggagaactgagcccctgcagggtacctagctacatgccctgcagacacagagacttgggagccacatgcagtgatgcttaccaggggtgacagcgctccctcccttacctagcctcactgtgctcgttaaggatttctaattagcaggaagcaaccgaaggctgggagcgctacccctaacatgctactgacttgccttctcctttcccatctccactccagttgcttcccctttcgacgacgatgacaacatcatttagtggtatacctgtgaggagaattctgtcccctaccaggtgtccctgaattctgggtaccacttctgcagtggctccctcctcagcgaacagtgggtggtgtcagcagctcactgctacaagtagtaagtgtggggcccctgactgcaaagctcccagccaggctgcctgggagagcttggcttcagcccagggaactactgaggttgggtaagatggatgggagaggtggtggagaagaaaacttgttggcagcagcggactctccagagcagagagcgaacacaagacaggaagctctcacacccaggcaaatccatgaaacagcaagggttgtggtcataaaagcaggcagggatgatcttggtgtttggcagagctagtaagaacagcaggcaagtaccctttgctggttagctacacatcaaagtcacttaagaaagagtttttaaaagtactgatgcctgtgtcctatcccagggcaattatcaggaattttcaggaagagggtgtgaatatcagtgagtattaaacattctacctctggtaactgtagattgtatagacagagctgagaactgctccctacaccaagaactctcaaacctgagtttgcctcagaaccacctgcagggttgttaaagcacaaatcactgggacccatccccaaggttctgagcagtaggtgggggtaaggaccaagaatttacatttctaacaagttcccaggagatgctaatgctatggctacccttaggttagattacacagaagggtggtgctcaccaggccaagaaaggagggaggaacaggcactgtgcacagttagcaaaggcctggggtgaagaatgctgggaaaacttcaaagagctccttgtgcccacagtgctagtgactgtggagattgtgggaaagaggctgggaaggagggttaaggagcatcctccggtggaatccttttgactcttcccaaccccattaccaccaacctctgaaacagaaaggtcctgggtctcacaacttcactgacccccatccctctcctgcccatgtgatatggccacacaccccacccgatgcctccagagctgcccatgagcagggagcttgaggaccctggggaaagtaagatgggtgtcccagctgtgggagaaggtcttcaccatgcctgccctgcccatcagccgcatccaggtgagactgggagagcacaacgtcgaagttctggaggggaatgagcagttcatcaatgcagccaagatcatccgccaccccaaatacaacagttggactctggacaatgacatcctgctgatcaagctctccatgcctgctgtcatcaatgcccacatgtccaccatctctctacccaccgcccctccagctgctggcaccaagttcctcatctctggctagggcaacactctgagctctggtggtgagtgggaccctttgtccttctccttccctccatcctcacaatttccagaacaaaccatgccccttaacttgaatcctctcacctccaggcttaagacacatttctagtgcccattacacacaggctgtacagtggatggacatcagagagatgcaaagtctcaaggacttggctcctaaaatcaaaagacaggacatatagagaacttgctttgatcacgtcttggaaggggttcaaaaatgatcattctgggaactaaaagccagagtcccttgccaggacttaggtttcggagtcctctccagggacagtgttcctcttcaatgttccatcctagattattgtctccttctctggcctgatctacacttctactttctttgttctcttgctgatcctcacagccaactatccagatgagctgcagtgcctggacactcatgtgctgacccaggctgactgtgaagcctcctaccctggagagattaccaacaacatgttctgtgtgggtttccttgagggaggcaaggattcctgccaggtggtttgaccccttcccatgctgaggttcccactgatacccaggccccacccaggaaaaagatttgaactcccaaggtggcggggctcaggaggctccctgcactgcccccatggagaagtgaggaagactcccttgggctgcatcctgtctgcttaggaagaacagagaatgggccactgtgcgaaggacgtggagccaaagagctggctggaaaggagtcttttaaggttcagagcaaatgtagctatattcttcctctttctctctcttcatacagcttgtcccttcttctccccagggtgactctggtggccctgtggtctgcaacggacagctccaaggagttgtctcctggggctatggctgtgcccagaagaacaggcctggagtctacaccaaggtctacaactatgtggactggattaaggacaccatagctgccaacagctaaagcctctggtacctctgcagtctctataccaataaagtgaccttgctttcactgtctgtgtctgtgcctgctccctcacactgcttcacactggaaagcatcctccaatctcaggtcagccacgactcccccccttaaaggtaagctgaaccctcatctcccaaaatgtgttgcatggtacactagattagcacatacaaatagatggaatccaaaaattataagaaacttgggagaaaggggggcactgttttctagagaaatgtgtgtttcagaaagttggtctttggtgggggggtactgatttttatttgggcttctcacagtgggtagagctactctgccttcagaacaatcacagcacagaaaatgttgtcagcatcttcgaggcagcccaaaaaatccgaccagctgaatcttcttgctaaaatacatcaaaaaagacaaatgctgttggtgatgacgtgcctctcacaggaatatgtcagcaccaaaccctcaaccaagccctccctcctcattcacctggaaaattagactcaagcaaagctccctggcctcctacctcttccctcagttccctagttccatctctgtgagcaggctagagagatgttccacctaccatagcgggagctagactgcgacttgggaatcaagccaggtctgcacgctgcattttcatcttctttgcctttggggtaggacgccatatgaatcccacagttaacaccagctccccactctgaccagggaaagaaactagagagggtcaagattcacccatttgatcaattaactgaggtaggtttcattttcatataacttgcttgcctttgagatacttcaagtgacttacgtgggactccttaaaaaaaagtggagggaaagacatctgagcagccactctggccacatgttggctggcttgcacccactggatgcagcagagggaggcaggccccctggcacctctggcacctgccaaagcctcttccaggcaattctgagagggaccatgttggggctgtagctcatccaagcttgtcaccgaagatccaagcaagcttctctttgaaattccaccttcatcttctgtcccaagtggttgtggacacccctgggagctggtaacaagggccaggagcagccaaggaagacagacaagttcagagcacatttccagttacagggaacagagcacaggcctccaagtgtccacagagcagtgtgcaaattgcagggatgagtagaggaaaacctctacatggagcacagcattcctggcaaacacaagggaccgcagtccacatgctgtggaataaacccaagtatgcatcggacacttgtttggtaaacagtaaatgtgtaagatcaattaccttgagagggccatctgggctccagatatgtagttcatgtgaggagacggctaccactcactatcttcagaggaaaacagggctcagggcttgcacacaatggagatacacacaggtcacccagaacgtcaatacatacaaacatcactttgttcaacatggattttgtttttatggagtccaaacgcagaccgtagttcaccttacagccttgggtttgtctgcttttggagacatatatccagtagatagatagacaacacagatacatttttttccctttcttactgtaacgtcagtgcctcgtctgaatatcatcatcactcaagaatcaagggaagaacaaaatgcttcatataaacagggctgggcaaggagtcttagtttcccctgttttctgtctccattcagatcattcctatcaaagcccagctggttacctcaagccaagagacagacataaggatcccaatggccttctagatggctgcttccacctcctacctgggccacatagagtctttacacagaaatctgagttagccctgtgagaagggttgacagcacaaacagtgcatgaaaatcacagataaccatggtatatctcgcaagtggtcagtgtaaaataaaccaccaccaccaccacaaaaaacacaaaacaagcagaaaaatgcttattcaaaaatctaagacaaaatactgtgtgagaaacaggccacggggttgccttttctcaggccacacagctttcccattccatgtgctcacatggaccgtgagatgtgaaagtctgcagggcgtgtgctcgggatcgaggctggtactgttcacctgtgggtccagaccaaatggcaaagaggcagaaagctataactctgtccaccgccacggcttagggcctccttctcacagaggctccaaagagcccccacctcagccttcacacaaaacatctccttctggctgaacaacagccaggctggagtgccgtggcatgatctctgctcactacaacctccacctcccgggttcaagtgattcagtctcccaagtacacgggattacaggcactcgccaccatgcccagctgattttgtttgtttgtttgtttgtatttttagtggagacagggtttcaccatgttggccaggctcattttgaactcctgacctcaagtgatccaaggtactgggattacaggcatgagccaccacttctggcccaggacccattttttaaaaaaattttcaacttttattttagattcagggcatacgtgtgcaggtttgttacatgggtatattgcgtgatgctgaggtttggggcacaaatgttcttaccactcaggcagtgagaatagtgcccaataggtagttattcagccctttccaccctccttctctcttccctctagcagttacagtgtctactgttcccatctttatatccatgtgtaccaaatgctcagctcccacttatacagaagaacgtgatatttggttttacatacctgtgttaatttgcttagaattatggtctccatctccatccacgttgctgcaaagacatgatttcattttttcatagctgcatagtattccatggtgtatatgtaccacatttcctttatccaatctaccgttgatggccacctagattgattccatggctttgttattgtgaatagtgctgtgacggacatgcaagagcatgtgtctttttggcagaccaattattttcctttgggtatatgcccagtaaaggaattgctgggtggaaaggtagttctgtttttaattatttcagaaatctccaaactgccttctgcattaatttttccataaactaatcgacagtcaggccaagagtgtataagcattccctttcctctgcagccttgacagcatcttctatttttttttttttttttttgacgttttaataatagccactctgcagccaagctctttcaaggccaatgtggggtagagccacaaacatcccttttccggaagagaattcttgcctgcccactggtagaattcttgttttcatctgtcttttattatttgtttttcaaagaaaaactggcctgtaatcccagcactatacgtggccgaggcgggcggatcacgaagtcaggagatagagaccatcctggctaacacagtgaaatcccgtgtctactaaaaacataaaaaattagccgggtgtggtggcaggtgcctgtagtcccagctactcgggaggctgaggcgggagaatggcgtgaacctgggaggcaaagcttgcagtgacctgagatcatgctactgcactccagcctggacaacagagccagactctgtctcaaaaaaaaaaaaagaaagaaaagaaaagaaaaaaaagaaaaaccaaaggtaaagtggtaagatcttccacacctgaaccagtttgtagccaccagagcctgctgcgaaggggcccctcaagcatgcattcatcttgtcacctggaatttgagagatcaagaagccccatagcaacctaccatgcaactgcccatcagtgctgatcctttcaagggattatctcaattctgactctgcagacactggcagccacaggtgacaaaccctgtgtatctgtgggctttcctcatcacccagggccacaatggggtgcctgccctaggcagagacacagcaacattctcttaaactgaaattaagcataaatccacttcaccaataatcatctgagggctcagtccctgtctccttcctcggggattttaaaacacacatttctctgaccaaacaggtaggtgagatctgactttaaaggggggaaattgggttgaattgaggtatcaggaatggatcacaagtgtttttgtgtggggacaggcatccacatcccgaactgtacctggagatggagaaaaatgcaggagaggagaagagaaaaaaaggaggaaaaagtggctgaaagtatttgaaagcttctctcatggttctttctggctctggttgcttttccaaggtcttgagtgcaggcagggccagctctggctgggagctgctgctctgggacatggaagagtcacttcacctccagaaagttcattcgatcatctgtaaaatgggcaagcccataggtggttgtgatgataaaatgaaaaaaaaaattcttaacttacatgagttacatgctgtatagtaagttatgtgctatataggaagcacacagaaatgattcactgttatcataatagaaggacagtggcttggtgtgctaagcactaaatacaagccagaaaaaatgtcttagagaagtagacaaagaaatctatagttcagaaccaacagtaccaagaatgacatgtcctccaaattgagcttgggcaggtagatctgaacctatcctacacatctgagtctatgatatgaggtaatagtctccacctatagctatcttctctgcctgtgaggtcattcctttttgaagaaagctgacctcagactatactgtgatcatttaaggaagagcacaaaatactggagaaggctagtcttcaagctctagatacagaaaatcctcatattcttgggtgttccctttcagacagagaatcagagccacaagcactaatccagaaaccccctttcccaaaaacgttttccatctcctaccaaggttcacatccctattgagtgctcactagtgtctatagttgctagagcaagagtctctccttattctctaaggcaggagttctgtgaaggccccatgacaaggggacaaaatgaaacaacatgtttagggacaacacaggaaaaacccatattatcaaagctccaaaacctggctacctcaggcttggccagttattcatgagcagagaggtttctcatctacatggcagtcatggcctggatgggtctggaactgtggcaagataaggctctgagacaaggtgccaggagaaagatgaattcaatcatccatttctgccaggaagaaaagcaccaggaaggaatcagatgtacagtttgtcctctggggacctctgccttgatccgcaataaatctccttttagatgccacgtgcagcaattcccacactttacaatgctctccatggcttctgttggccttatggtcagctctgccaagatctgtattcttgggcaagacagaatccttctgaatctcagtctcttcctctataaatggaaacaatttggctctacacaaatcacaattagcatgtttgtgggaagttaaaccgtgaaactcagcatcaatgaaaagcaatgtaccactgttgcttatgaaaactcttgtaaagttgtcaggcaccatgcaccatctaagtacagcagtgttaggtataagcccatcagtgattagagggggtatggggtggagagggggtctctgagcagtgggtctccgggctctggggaagctggctgggtggccatactaggagctgaacccgaaggtactctgtgtgtcctctcaactccacgggccccactttggcattttctccaattccctctcgtttccatttgcttcctccctctagccccctggctgtgtccaatttcaacaccaagtttctgagcttttctcattttgttcactgtctccagaacatccctgcttcttttacctttcaaagaattcaaacttgaactctgctcactcctgcccatcaccaacctgagctcagagttcctgagaagggaaagcaccctcataaggaaactcctccttttcttacatcattagacttgagcacagacagcatttccatctccacactgctctggccaggttgtgcctcagtcaattacacaactgtgtctcagtagccttggtagggcccaaatcaggatattctttgggaagtttcactttgtactgagccaagcataatctcccgggatctaaaatagaaaattctagacccacccctccacatcttcgttattgaacccaatatgtcacccatttaccatgtgctcaaatctctacctactgctgattctcagatcaaatcgtaacccaggtttaccatggtccaaactctgacatctgattggggccatgtcatcctggttcaggctgtcagccccaagcaggtgggtcagtttgcctcaccctgagagcaggttgccagggcaaccatgaggctgcataaaaagaacctatgacaggatgcatatgagagagacaaatgtcttcacattgaagaaggggaggagtgcaccattggttttccatcctccagatgcactaagctcctacctaaactgtgccccctccttctttgaaacacatcccatccttaagccttggtaggaaggagagccatctggaagccctgaatcctatggaatgctgagtctcccttctccttaccccttagtgttggaattctcattccccaaagtcttggatttgaccttgcccgacactgactggagagaagcatcttcatattcacaggaatgagccttagatcagactttgctcctctcctgggagctccaggacactgaaaagccaagcttgttaccaatacttgcccttccttaagtacattaaatacatcccaaatagttaaacagattcctaaacagccaggccattctccctccttctaaccctcatctcctcggcctacgaaagcccagatgtgtgatccagggcttggcttcccctgtcttccccatcccagcatccttgcgggaaagggctgctctctctctctgctttcagaaggcaaatttccttatcacctatgagtcacaaacccagagagtggccaaacatagccaagctgatgcaagaccctgggaaggggaaagctgcaggtgtgtttgtgctgggaggagtgctgaccctcacctcagagacacctcctctccagatcctcaggaggtataaagacaggtcctccaccaccagtcaggcacactctaccaccatgaatccactcctgatccttgcctttgtgggagctgctggcgagtttcatgccatgcctcaggccccaaccaccccctttcctggcagacacttgccctgccattcttgccacctttcccattttgactgtgttctgatattctatttcctccatctctccttcccatcctccttcggctctctttaagcctcacctgtttcagcttctccatgatttcactcccaccactgtcattcatccatatctgagctgtggctggagaagctgggaagggagaccaggtggggcgggcccacaaaatgaagcagcagccttcaggcttggctccatagcaccagtatagcaccattatatctgctcttaacctcaaatgcacctggggaggttgaaaaattactcatatcagagactcagctttagaagttctaacttcattctctggggtgcaacctgtgtactgggcttttaacattcccgggtgatttttaacatttccatgcatgcagccaaggttaagaattgctgttctattggccaataacaatgtctacctttgttctgccaaagtgagcctgggggctgccctcaactctgccctgactacacaaatctgagctatgggggaagctggtcatggccaggtctacgcagccagggggttttcctagcttggccaaagtatactgacaatccagggctcaaatcgccaggggaagtacacaggtgatgaataaaagagagaagcactcagtgggtgagacaaccacatcccaattcctatcccactggaagcattgtgaggacattccttgaatcctcagcctggtgaccccggggagaactgagcccctgcagggtacctagctacatgccctgcagacacagagacttgggagccacatgcagtgatgcttaccaggggtgacagcgctccctcccttacctagcctcactgtgctcgttaaggatttctaattagcaggaagcaaccgaaggctgggagcgctacccctaacatgctactgacttgccttctcctttcccatctccactccagttgcttcccctttcgacgacgatgacaacatcatttagtggtatacctgtgaggagaattctgtcccctaccaggtgtccctgaattctgggtaccacttctgcagtggctccctcctcagcgaacagtgggtggtgtcagcagctcactgctacaagtagtaagtgtggggcccctgactgcaaagctcccagccaggctgcctgggagagcttggcttcagcccagggaactactgaggttgggtaagatggatgggagaggtggtggagaagaaaacttgttggcagcagcggactctccagagcagagagcgaacacaagacaggaagctctcacacccaggcaaatccatgaaacagcaagggttgtggtcataaaagcaggcagggatgatcttggtgtttggcagagctagtaagaacagcaggcaagtaccctttgctggttagctacacatcaaagtcacttaagaaagagtttttaaaagtactgatgcctgtgtcctatcccagggcaattatcaggaattttcaggaagagggtgtgaatatcagtgagtattaaacattctacctctggtaactgtagattgtatagacagagctgagaactgctccctacaccaagaactctcaaacctgagtttgcctcagaaccacctgcagggttgttaaagcacaaatcactgggacccatccccaaggttctgagcagtaggtgggggtaaggaccaagaatttacatttctaacaagttcccaggagatgctaatgctatggctacccttaggttagattacacagaagggtggtgctcaccaggccaagaaaggagggaggaacaggcactgtgcacagttagcaaaggcctggggtgaagaatgctgggaaaacttcaaagagctccttgtgcccacagtgctagtgactgtggagattgtgggaaagaggctgggaaggagggttaaggagcatcctccggtggaatccttttgactcttcccaaccccattaccaccaacctctgaaacagaaaggtcctgggtctcacaacttcactgacccccatccctctcctgcccatgtgatatggccacacaccccacccgatgcctccagagctgcccatgagcagggagcttgaggaccctggggaaagtaagatgggtgtcccagctgtgggagaaggtcttcaccatgcctgccctgcccatcagccgcatccaggtgagactgggagagcacaacgtcgaagttctggaggggaatgagcagttcatcaatgcagccaagatcatccgccaccccaaatacaacagttggactctggacaatgacatcctgctgatcaagctctccatgcctgctgtcatcaatgcccacatgtccaccatctctctacccaccgcccctccagctgctggcaccaagttcctcatctctggctagggcaacactctgagctctggtggtgagtgggaccctttgtccttctccttccctccatcctcacaatttccagaacaaaccatgccccttaacttgaatcctctcacctccaggcttaagacacatttctagtgcccattacacacaggctgtacagtggatggacatcagagagatgcaaagtctcaaggacttggctcctaaaatcaaaagacaggacatatagagaacttgctttgatcacgtcttggaaggggttcaaaaatgatcattctgggaactaaaagccagagtcccttgccaggacttaggtttcggagtcctctccagggacagtgttcctcttcaatgttccatcctagattattgtctccttctctggcctgatctacacttctactttctttgttctcttgctgatcctcacagccaactatccagatgagctgcagtgcctggacactcatgtgctgacccaggctgactgtgaagcctcctaccctggagagattaccaacaacatgttctgtgtgggtttccttgagggaggcaaggattcctgccaggtggtttgaccccttcccatgctgaggttcccactgatacccaggccccacccaggaaaaagatttgaactcccaaggtggcggggctcaggaggctccctgcactgcccccatggagaagtgaggaagactcccttgggctgcatcctgtctgcttaggaagaacagagaatgggccactgtgcgaaggacgtggagccaaagagctggctggaaaggagtcttttaaggttcagagcaaatgtagctatattcttcctctttctctctcttcatacagcttgtcccttcttctccccagggtgactctggtggccctgtggtctgcaacggacagctccaaggagttgtctcctggggctatggctgtgcccagaagaacaggcctggagtctacaccaaggtctacaactatgtggactggattaaggacaccatagctgccaacagctaaagcctctggtacctctgcagtctctataccaataaagtgaccttgctttcactgtctgtgtctgtgcctgctccctcacactgcttcacactggaaagcatcctccaatctcaggtcagccacgactcccccccttaaaggtaagctgaaccctcatctcccaaaatgtgttgcatggtacactagattagcacatacaaatagatggaatccaaaaattataagaaacttgggagaaaggggggcactgttttctagagaaatgtgtgtttcagaaagttggtctttggtgggggggtactgatttttatttgggcttctcacagtgggtagagctactctgccttcagaacaatcacagcacagaaaatgttgtcagcatcttcgaggcagcccaaaaaatccgaccagctgaatcttcttgctaaaatacatcaaaaaagacaaatgctgttggtgatgacgtgcctctcacaggaatatgtcagcaccaaaccctcaaccaagccctccctcctcattcacctggaaaattagactcaagcaaagctccctggcctcctacctcttccctcagttccctagttccatctctgtgagcaggctagagagatgttccacctaccatagcgggagctagactgcgacttgggaatcaagccaggtctgcacgctgcattttcatcttctttgcctttggggtaggacgccatatgaatcccacagttaacaccagctccccactctgaccagggaaagaaactagagagggtcaagattcacccatttgatcaattaactgaggtaggtttcattttcatataacttgcttgcctttgagatacttcaagtgacttacgtgggactccttaaaaaaaagtggagggaaagacatctgagcagccactctggccacatgttggctggcttgcacccactggatgcagcagagggaggcaggccccctggcacctctggcacctgccaaagcctcttccaggcaattctgagagggaccatgttggggctgtagctcatccaagcttgtcaccgaagatccaagcaagcttctctttgaaattccaccttcatcttctgtcccaagtggttgtggacacccctgggagctggtaacaagggccaggagcagccaaggaagacagacaagttcagagcacatttccagttacagggaacagagcacaggcctccaagtgtccacagagcagtgtgcaaattgcagggatgagtagaggaaaacctctacatggagcacagcattcctggcaaacacaagggaccgcagtccacatgctgtggaataaacccaagtatgcatcggacacttgtttggtaaacagtaaatgtgtaagatcaattaccttgagagggccatctgggctccagatatgtagttcatgtgaggagacggctaccactcactatcttcagaggaaaacagggctcagggcttgcacacaatggagatacacacaggtcacccagaacgtcaatacatacaaacatcactttgttcaacatggattttgtttttatggagtccaaacgcagaccgtagttcaccttacagccttgggtttgtctgcttttggagacatatatccagtagatagatagacaacacagatacatttttttccctttcttactgtaacgtcagtgcctcgtctgaatatcatcatcactcaagaatcaagggaagaacaaaatgcttcatataaacagggctgggcaaggagtcttagtttcccctgttttctgtctccattcagatcattcctatcaaagcccagctggttacctcaagccaagagacagacataaggatcccaatggccttctagatggctgcttccacctcctacctgggccacatagagtctttacacagaaatctgagttagccctgtgagaagggttgacagcacaaacagtgcatgaaaatcacagataaccatggtatatctcgcaagtggtcagtgtaaaataaaccaccaccaccaccacaaaaaacacaaaacaagcagaaaaatgcttattcaaaaatctaagacaaaatactgtgtgagaaacaggccacggggttgccttttctcaggccacacagctttcccattccatgtgctcacatggaccgtgagatgtgaaagtctgcagggcgtgtgctcgggatcgaggctggtactgttcacctgtgggtccagaccaaatggcaaagaggcagaaagctataactctgtccaccgccacggcttagggcctccttctcacagaggctccaaagagcccccacctcagccttcacacaaaacatctccttctggctgaacaacagccaggctggagtgccgtggcatgatctctgctcactacaacctccacctcccgggttcaagtgattcagtctcccaagtacacgggattacaggtgcatgccaccatgccaagctaattttttttttcttttttgtatttttattagagacagggatttacgatgttggccagtgtggttttgaactcctgacctcaagtgatccagagtgctaggattacaggtgtgagccacagcttctggcccaggccccattttttaaaaaataatttcaaattttattttagattcatggggtacatgtgcaggtttgttacatgggtatactgtgtgatgctgaggtttggggcacaaatgatctcctcactcaggaactgagcacagtacccaataggtattttttcagccctttccacactccttctctcttccctctagtagttgcagtgtctactcttcccatctttacatccatttttacccaatgctcagctccgacttatacatgagaacgtgatatttggttttctgttcccatgttaatttgcttaggattatggtctccagctccatccatgttgctgcaaaggacatgatttcattcttttcatggctgcatagtattccatggtgtatatgtaccacattttctttatccagtctaccgctgatggccacctaggttgattccatggctttgctactgtgaatagtgctgtgatggacatgcaagagcatgagtctttttggcagaacaattactttcctttaggtaaatgcccaataaagcaagtgctgggtggaaagatagttctgttttaaattgtttcagaaatctccaaacggttttctacattaatttttccatgaactgatttacactctggccaacagtgtacaagcattccctttccactgcagcctcatgagcatcttctattctgtggacattttaataataaccacactgcagccaagctctttcaagcccaatgtggggaacagccacaaacatcccttttcccaacgagaattcttgcctgcccactggtagaattcttgttttcagctgtctttcattgtttgcttttcaaagaaaaaccaaaggtaaagtggtatgatcttccacacgtgaaccagtttgtagccaccagagcctgctgggaaggggcccctcacgcatgcattgatcttgtcatgtggaatttgagagatctagaagccccacagcaacctaccatacaactgcctatcagcgctcatcctttcacaggattagctcaattctggctctgcagacactggcagccacgggtgagaaaccctgggcctctgtgggcttccttcatcacccagggccacagtgggctgcctgtcctaggcagagacacagcaacattctcttaagctgaaattaagcataaacccacttcaccaataatcatctgagggcacagtccctgcctccttccttggggattttaaaacacacatctctctgaccaaacaggtaggtgagatctgactttaaaggggggaaagtgggatgaattggggtatcaggaatgaatcccaagtgtttttgtgtggcgaatggcatccacatcccaaaatatacttggagatggggaaaaaagcaggagaggagaagggtaaaaaaggaggacaaagtgtctgaaagtcattgaaagcttctctcatggttctttctggctctggttgctttgccaaggtcttgagtgcaggcagggctggctctggctgggagctgctgctctggaacatggaagagtcacttcaccttcagaaagctcatttgctcatctgtaaagtgggcaattccataggtggttgtgatgataaaatgaaaaaaaagttcttaacttatatgagtgacatgctgtatagtaagttacatgctatataggaagcacacagaaatgattcactgttatgataatggaaggacagtggtttggcatgttaagcactaaacacaagccagaaagatatcttagagaagtagacaaagaaatctatagttcagaatgaacagtaccaagaatgacatgtcccccaaattgagcatgggtagctggatctgaacctatcctacacatctgagtctacagtatgaggtaacagtcttcacctatagctatctcctctgcctgtaaggtcattcctttttgaagaaagctgacctcagactatactgtgatcgcttaaggaagagcacaaaatactggagaaggctagtcttcaagctctagatacagaaaatcctcaattcttgggtgttacctttcagaaaaagagtcagagctacaagccctgatccaaaaatccctttttccaaaaaaattctccatcttctaccaaggttcacctccctgtttagtgcacactggtgtctatagttgctagagcaagagtctctccttatcctctaaggcaggagttctgtgaagaccccatgacaaggggacaaaatgaaataacatgttcagcgacaacacagcaaaaccccatattatcaatgctctaaaacctagctacctcaggcttggccagttattcatgagcagagaggtgtgtcatctacatggcagtcatggcctggatgggtctggaactgtggcaaggtaaggctctgagaaaaggtgccaggagaaagatgaattcaatcatctatttctgccaggaagaaaagcaccaggaaggaatcagatgtacagtttgtcctctggggacctctgccttgatcctcaataaatctccttttagatgccacgtgcagcaattcccacacttcacaatgctctccatggcttctgttggccttatggtcagctctgccaagatctgtattcttgggcaagacagaatccttctgaatctcagtctcttcctctataaatggaaataattttgctccacacaagtcaccattagcacgttggtgggaagttaaactgcgaaactcagcataaacaaagagcaatgtaccactgttgcttacgtgaaaactcccgtgaagcagtcaggcaccatgcaccatctaagcatagcagcgttaggtatcagcctattagtgattagagagggtaccggggagagagggggcctcagagcagtgggtctcctggctgtggggaagctgcctcagtggccatgccaggagctgaacctgaaggtactctgtgtgtcctctcaacaccatggaccctattttggtatttttttccagttacctctggtttccatttgcttcctccctctagccccctggccatgtccgatttctccagcaagtttctgagcttttctcattttgctcactgtctccagaacatccctgcttcttttacctttcaaagaattcaaacttgaactctgctcactcctgcccatcaccaacattagctcagagttgatgagaagggaaagcaccctcataaggaagcccctcctttccttacattattagacctgagcgcagacagcatctccatctccacactgctctggccaggttatgcctcagtcaattacacgactgtatcttagtacccttggtagggctcaaatcaggatattctctagaaagattcacttagtactgagccaagtataatctcactacatctaaaatagaaaattctagacccacccctccacatctttgttattgaacccaatatgtcacccatttaccatgtgctcaaatccctacctactgctgattctcagatcaaatcataacccagatttaccatggtccaaactctgacatgtgatcaggggcatgtcattctggttcaggctgtcagccccaagcaggtgggtcagtttcaatcaccctgagtgcaggttgcaagggcaaccatgaggctgcataaaaagaacctatgacaggatgcacatgagagacaaatgtcttcacattgaagaaggggaggagtgcgccattggttttccatcctccagatgcactgagtaagctcctacctaacctgtgccccctccttcttctcatccctatgccgtggtaggagggagagccatcttcaagcccagcatcctatggaatgctgagtctctcttctccttaccccttaatgttggaattctcattccccaaagccttggatttgactttcccactgagtgactggagagaagcatcttcatattcacaggaacaagccttagttagataagactttgctcctctcctgggagctccaggacactaaaaagccaagcttgctaccaacacttgcccttccttaagtacattaaatataaccccaatagtaaaatatattcctaaacagccaggccattctccctccttctaaccctcatctcctcggcctaagaaagcccagctgtgtgatctggggcttggcttcccctgtctttcccatatcagcatccttccaggaaacagccggtctccctctctgctctcagaaggcaagtttccttatcacctgtgaatcacaaacccacagagtggccaaacatactgatgcaagaccataggaaggggaaagctgcaggtgtgtttgtgctgggaggagcagtgaccctcacctcacagacacctcctctccccatcctcgggaggtataaagacgggttctccaccagcaatcaggcacactctaccaccatgaatctacttctgatccttacctttgttgcagctgctggtgagtttcacgccctgcctcaggcctcaaccaacccttccctggcagacacatgccctgccattcttgccacctctcctcttttgactgtgctgtgatattctatttcctccatctggcatttcttcttcccatcctccttgggctctttttaagcctcacttgttccaccttctccttgatttcactcccaccgctgttattcatccatatccgagctgtggttggagaagctgggaagggagaccaggtggggctggcccatgaaatgaagcagtaggcttcaggcttggctctgacagcaccacaatagcaccactatagctgctcttaacctcgaatgcacctggggaggttgaaattactcatgcaagacactcaactctagaaattctcacttcaattgtctggtgtgcagcctgtgttctgggcttttaagcttcccaggtgatttttaacatttctaggcatgcagccaaggttaagaattgctgttgttttgaccaataataacgtatacctttgttctgcaaaagtgagcctggggcttccctcaactctgccctcactgggcagatttgagctgagggggaaactggtcatggccaagtcgatgtcgccagggggttttcctagcttggccaaagtagccagacaatccggggcttaaataaccaggtggagtacacaggtggtgaataaaagagagaagacttcagtgcttgagacagccacatcccaaatcctatcccactggaagtattgtgaggatattccttgcgtcctcagcctggtgaccccaggagagatctgaacccccacagggtacctagctacgtgccctgcagacacagagacttgggagccacatccagtgatgatcaccagggctggcagcgctcccccccttgcctagcctcactgagcttgttaaggttttctaattagcaggaagcagccacaggctgggagcgccacccctaacatgctactgacttgccttctcccttcccatctccactccagttgctgccccctttgatgatgatgacaagatcgttgggggctacatctgtgaggagaattctgtcccctaccaggtgtccttgaattctggctaccacttctgcggtggctccctcatcagcgaacagtgggtggtgtcagcaggtcactgctacaagtcgtaagtgtggggcccctgactgcaaaactcccagccaggctgcctgggagagcttggattcagcccagggaagtactgaggttgggtaggacggacgagagagatggtggaaaagaaaacttgttggcagcagctgactctccagagcagagagtgaacacaagacaggaagccctcacacccaggcaaatccatgaaacagcaagggttgtggtcataaaagcaggcagggatgatcttggggtggtgagagctagtgagaagagcaggctagtacttttgctggttagctacacattaaagccacctaagaatgagtacttaaaaatactgatccctgtgttctatcccagggcaattaactcaaaattatcaggaagagggtgtgaatatcagtgagtatttcacactctacctctggtaactgtagagtgtatagacagagctgagaactgctgcctacaccaagaactcttaaacctgagtatgcatcagaactccctgcaggcttgttaaggcacaaatcactgggacccatccccaaggttctgatcagtaggtgggggtaaggaccaagaacttacatttctaacaaattcccaggagatgctaatgctatggctacccttggattagattacacagaagggtggtgctcaccaggccaagaatggagggaggagcaggcactgtgcacagttagcaaaggcctggagtgaagaatgttgggaaaacttcaaggagctccttgtgcccacagtgctagtgacatggagattatgggaaagagtctgggaaggcagattgaggagcagcctctggtgggatccctttgactcttccccactccactaccaccaacctctgaagcagaaaggtcctgggtttcacacctgcactgacccacattgctctcctgcccatgcaatatggccacacaccccaccccatgcctccagagctgtccatgagcagggagcttaaggacccatggaaaggtgggaggggtgccctggctgtgggagaaggtcttcaccatgcctgccctgcccatcagccgcatccaggtgagactgggagagcacaacatcgaagtcctggaggggaatgaacagttcatcaatgcggccaagatcatccgccaccccaaatacaacagccggactctggacaatgacatcctgctgatcaagctctcctcacctgccgtcatcaattcccgcgtgtccgccatctctctgcccactgcccctccagctgctggcaccgagtccctcatctccggctggggcaacactctgagttctggtggtgagtgggaccctttgtccttctacttccctccatcccacaatttccagaacaaaccatgccccttaacttaaatcctctcgcctccaggcttaagacacatttctagtgcccattacacacaggctctgcactgggcaccagagagatgcaaattctcaaggatgtggctcctaaaatcaaaagacaggacaaatggagaacttgctatgatcacttcgtgggagaggttcaacaatgatcattctgggaactaaaagccagagtcccttgccaggacttatgttttggagtcctctccaggggcagtgttcctcttcaatgttccatcctagactattgtctctttctctggcctaacccacatttctttctttgttctcttcctgatcctcacagccgactacccagacgagctgcagtgcctggatgctcctgtgctgagccaggctgagtgtgaagcctcctaccctggaaagattaccaacaacatgttctgtgtgggcttcctcgagggaggcaaggattcctgccaggtgatttgaccccttcccatgctgaggctcccactgataaccaggccccaccagggaaaatgatttgaactcccaaggtggcggggctgaggaggctccctgcagtgccccatggagaagtgaggaagactcctttgggctgcatcctgtctgcttaggaagaacagagaatgggccaccgtgagaaggacgtggagccacagagctggctggaaagggctcttttaaggttcagagcaaatgtaggtgtattcctcctccatctctctcttcatacaacttgtcccttcttccccccagggtgattctggtggccctgtggtctccaatggagagctccaaggaattgtctcctggggctatggctgtgcccagaagaacaggcctggagtctacaccaaggtctacaactatgtggactggattaaggacaccatagctgccaacagctaaagcccctggtccctctgcagtctctataccaataaagtgaccctgctctcactgtctgtgtctgtgcctcctccttcacactccttcacattggaaagcatcctccaacctcaggtcagacagggctctcccccttaaacataagaagagcctccagctcccaaatgtgttccatggtacactagattaacacatacaaagaggtggaatccaaaaataagaagcttgggagaaaggggggcactgttttctagagaaacgtgtgtttcagaaaggtggtcttcggcaggggctattgttttatttgggcttctcagagtggttagagctactctgccttcagaacaatcacagtacagaaaatgtgtcagcatcttcgaggtggcccaaaatatttgaccagctgaaacttcttgctaaaatacaacaataattacaaatgctgctggtgatgacgtgactctcccaggaatgtgtcggcaccaaaccctcgaccaagccctcccttctcattcgcctggaaaatcagactcaaataaatcttcctggccctccgactcttcccttaattccctagttccatctctgtgagcaggctagagagatgttccacctaccacagcgggagccagactgcgacttgggaatcaagcccagctcttcatgctgcatttttatcttctttgcctttggggtaggatgccacagtgaatcccacagctaacaccagctcctcactctgaccagggaaagaaactacagagggtcaggattcacccatttgatcaattaactgagaaaggattcattttcataaaacttgcttgactttgagacacttcaagtgagttatttgggattctttaaaaaaggtggaaggaaagatctgaggactgtgacacaaccagccactctgaccacacattgactggcttgcacccactggacacagcagagggaggcaggcttcatggcacttgcggcacctgccaaagcctccttctggcaattctgagagggcctaagttggggccgtagctcatccaagcttgtcacccaagatccaagcaagcttctctttgaaattccaccttcaccttctgtcccaagtggttgtggacatccctgggagctggcgctaagggccaggagcagccaagggagacagacaagttcagagcacatttccagttacagggaacagagcacaggcctccaagtgtccatggagcagcgtgcaaattgcagggatgagtagagtaaaacctctacatgcagcacagcattcctggcaaacacaggggaccacagtacacatgctgtggaatacacccaagtatgcatcagacacttgtttggtaaacagtaaatgtgtaagatcaattaccttgagagggccatctgtgctccagacatgtggtttgtgtgaggagacggctaccactcactatcttcagaggaaaacagggctcagggcttgcacacaatggacagatacacatgggtcacccaaaacgtcactgcatacaaacatcactttgttcaacatggattttgtttttatggagtccaaatgcagaccctagttcaccttacagccttgggtttgtctgctttgggagatatatatccagttgatagacagacaagacagatacattttttccctttcttaccacaatgtcaatgcctcatctgaatatcatcattactcaagagtcaagggaagaaccaaacgcttcatataaacagggctgggctgggctagatggggagtgttagtttccagtgttttctgtctccattcagatcattcctatcaaagcccagctggtcacctcaagccaagacacagacataaggatcccaatggccttccagatggctgcttccacctcccatcttggccactaagactctttacacaggaaagtgagtcaccccagtgagaagggttgccagcggaaatagggcatgaaaatcacagataaccatgggatttcttccaagtggtcagtgtaaaataaaccaccaccaccaccaccgaaaacacaaaagaagcaaaaaaagtgcttattcaaaatccaagacaaaatactgtgtgagagtcaggccacggggttgccttttctcaggccacacagctttcccagtccgtttgctcgcatggaaccgtaagatgtgaaggcctgcagagcgtgtgcttgggatggaggctggtactgttcacctgtgggtccagaccaaagggcaaagaggcagaaaactgaaactctgtccaccggcacagcttaggcccttctgctcatagaggctctgaagaacccccacctcagccttcacacatatccttctggctgaactacagccaggctggagtgccatggcatgatctctgctcactacaacctctgcctccagggttcaagtgattcagcctcccaagtagctggaattacaggcacccaccactgtgcccagctaatttattttttattttatttatttatttatttatttatttatttatttatttattttgtatttttagcagagacagggtttcaccatgttggccagactggttttgaactcctgacctcaagtgatccaaagtgctgggattacaggcgtgagctaccgctcctggctcagaccccatttttaaaaaatattttcaacatttattttagattcatggggtacatgtgcagatttgttacatgggtatattgtgtgatgctgaggtctggggcacaaatgatctcctcactcaggcagtgaccatagtacccaataggtatttttttagctctatccaccctccttctctcttccctctagtagttgcagtgtctagtcttcccatctttatatccatgtgtacccaatgctcagctcccacttatacatgagaacgtgatatttggttttctgttcttatgttaatttgcttatgattatggtctccagctccatccatgttgctgtaaaggacatgatttcattcttttcatggctgcatagtattccatggtgtatatgtaccacatttccttcatccagtctaccgctgatggccacctaggttcattccatggctttgctactgtgaatagtgatgtgatggacatgtgagagcatgtgtctttttggcagaacaattattttcctttgggtaaatgcccagtaatggaattgctgggtggaatcgtagttctgttttaaattatttcagaaatctccaaactgctttctgcattaatttttccatgaactcatttacactctgaccaacagtgtataggtgttccatttcctctgcagcctcaccagcatcttctgttttttgacattttaataatagccactctgcagccaagctctttcaaggccaatgtggagaagagccacaaacattccttttcccgaagagaattcttgcctgcccactggtagatttcttggtttcatctgtctttcattgtttgtttttcaaagaaaaaccaaaggtaaagtgataatgatcttccacacctgaaccagtttgtagccaccagagcctgctgggaaggggcccctcacgcatgcattgatcttgtgacctggaatttgagagatcaataagccccgtagcaacctaccatacaactgcccatcagcgctgatcctttcatgggattagctcaattctggctctgcagacactggcagccacagttgacaaaccctgggcctctgtgggcttcctttgtcacccagggccacagtgggctgcctgtcctaggcagagacgcagcaacattctcttaaactgaaattaagcataaatccacttcaccgataatcatctgagggctcagtccctgcctccttcctcggggattttaaaacacacatttctctgaccaaacaggtaggtgagatctgactttaaaaggagggaaaatcgggttgaattggggtatcaggaatgaatcccaagcatttttgtgtggcgagaggcatccacatcccaagctgtacctggagatggagaaaaatgcaggagagaagaagagaaaacaaagggggacaacgagccctggttgctttgccaaggtcttgggcacagacagggccggctctggctgggagctgctgctctaggggttgggagagttctgttcatccatggtgctcagcagcagggactgggggccgtggtaggtgcagatgcccagactctcaagcttgctccttgcatggctggcaggggcattgctccttgtcaccaggtgactgcacagggcagctgtcatggacatccagggggccatccagagcatcactgatgagcatgttgaatgctttggggccatcgtcatgttggccccagttgcacacatggtatcttctctttgcttggggcgaagggggcggggaggggcggggatagtctgccatgctcagagttgtaatcattcagcagctgctccatatattctaaatccttgcacaggaaggctcctcggcccaactcccccaggctggccacacagacactgggctccattcccaagtctttggtggctgctgtgtcagctggtgtcagaggccccagggtcagcaatgagtgggggtcttgtgctgcttctgctaggcccagccaaggggctgctctgtgcctcctgggagtcccagggtcactgccaccttaagggccacatgccatagctggaagtcactatatgtttggggaagagttggagatcgggaaaccattccctcataacaaggtagtaaatagtttggcaaaaaactgaagataaagtggcagtgctgagtaatcatgggcttcctacaggtgatcgggttgatttcttgttgccactgcctggcctgaagacagtgcttggctcagcggtggcagcagacgaagcagcagctcaagaggatgatgatggtggcccacaccagccagagccacagcagtgttttttgtcacaggtgtagcttggattgttggtaccacacaggcttatcccatgggggttcaccctgggttgacaggggctgggcagcacctggaggaccaggaacaccacccacacccccacacacacaccacccagaccatctcctctgcaagcccctcctgctcctgctcctccatcacagcactgccctccttctgcttcctctcctcctctgccctccagaacagtggtcttaaagaggtttcttggccttggcacttctgtgggctcccaatgtgctgatgtgtgacacgctggcatgcttggcaagacctcactgctgcctttgactacacagggtcctctctgtacccagagcaaacatatgcaaggaaaccccagcactgaccgaatcagcttcctcggaggcccctctccacatgtgctcctgctaacccagtctgtactccccacaagctgatgtcctgcttggagatgatcgtgctggccctcttgcccaacaactggctcctgtgtctggaggggagaagacaaatccttggtctccatccctcatgttcttgagaagtctgccttttattcctccacagaataataccaacatgtttacactattcctatgtatagacattttcccatttagttttctctcccctccggagtggttattaatccagcggtacagataagaaaacaggttcaaagaggcttattagtttacccacgtcccaagcccagcagatggtaggtctggggttgactcctcatttgcctggcttcaaagcccacgctctctgtgccccgcctcacatcccgctatgactgtggtctgaggtgatgacaagtccgtcagcgctgacctctgatgtttctccagccccctgtcactatcacccattcccttcctccctgcatctcctgaggggcacctcccaattgtcccattccatgcggcaagacgactgctctcagagagctcctggttatggcattgctccctaccctcccacagtgatcaaactagaattcaagctccctggggaaatgtagggttctcctggcaccacccttgcccccactcccagtctcatgcctcttcactgctctcctcccctgtcccctcccctgctcagaagccctggtggcccatccaacaagccatgcgcctcctgcctctgtctctggacactatggcactctcagactggaagccgttcctaacctccccttcacccttttcagaaaagtcttcctgattcttccttgtccccacctcccttgggtctggctctgctggccctccctcgggtctgaggcagccatcctcctcctgtctccgcttgcctctgtcctagtcctgctcaggtgctcaggtgcaatagatgcgtccatcctggcaatcaactgtgtgctcctcaagcgggtacatcttgtcttacatatcctgatatctccagtgattaagcaaagcctgggatgtaataagcacccagtgagtggaggaataaacatggagtggagggaaatgtgctgagaaaagaaagacccttccagaagaatgattctcaaagagtggtccctaagccagcaacaccaaaatctcctgggaatttaggagaaacacaaaagctaggccctaccccacacccaccgagtcagatctcctgggacagggcccaacaaacagcatatttttttatttgagatagggtcttgctctgttgcccaggctgaagtgcaatggcatgatcactgctcactgcagccttgacctcccaagctcaagtgatcctcccacctcagcctcccaagtagctaggaccacaggcgcacaccacaaacccagctaatattattattatttgtagagatggcaacctcatatgtcgctcaggctggtctcaaactcctaggctaaagtgatcgcctgcccctttgcctcccaaggtgctgggattacaggcgtgagccaccacacccagacagcaacctgcattttaacatatcttccaggtcttctgatgcccgctgaaaacttgagattggatacggtaatgacatccttaggccagtattgaaaccgccattgcaaaattgtaactgagacagtgaaacagatc

SEQ ID NO: 285 - DNA, 1507 bp, human
aagcttatgcagcgaaactgggatttttaaagccatcagacctcatgagactcatttactatcacaagaacagtgcattaaagacccgcccccacacataattccatcacctcccactggttcctcccacgacacatgagaattgtgggagttacaattcaagatgagatttgggtgaggtcacagccaaaccatgtcactttgcaacatcatgcattggtctttgggaaaatatcagcagatctttgaaacagtgacacttctagtataaatatcaaaacattacatccattcatatgaccgctgttctcattagaaaagcctttaagtattgcaaagctgccaagctcatggtggcatatgcaagtatcccaaaattctaattttcacttaagagctcaaattttatcgttggctataaatactgtcatttgttttccttgtgatgtcagactcagatttcttattttttacaaaatgcctgccaaatatacaagtctgaatagccacagcctgtctatcagttggcctttcaaacaaatatggtgttccatggaaaagcagatagttgagctcacagctcaaacaatcatgaagtgcctttcctcaggagcctgcatttattcatctaaaatgtaagtttctgcttgtaaaacatgttttaatagctgtgagaaagtcatgacggatgagttgaagcaagacgatactcacaaattatattgccactgtctggtggggaaaaatacaatgagcattagcacagtttagtgccactgcctcaactggtcctaaggcaccaaaaattgcatccaatatcggcagtccaactccttgcacacctgctctctcacagcttctttctcagtctaggccagcatcaccatggtagatgccttcctgtgcacctggaagctctcagacagcaagaattttgatgactacatgaagttaatcggtgcaagttttgctatcaggcaggtggctagcatgacaaagcctaccacaatcatcaaaaagaatggggacattatcaccttaaaaacacagagcatgttcaagaacacagagatcagctttaagctggggatggggttcgatgagacaacagcagatgacaaaaaggtcaagtccattgtgacactggatggaagcaaactttttcacctgcagaagtgtaacgggcaagagaggacacttgtgccagagctaagtgatgggaaactcatcctgacactcacccagggcactgcggtttacactcgcacttatgagaaagaggtatcgtctgcctgcgctgtcactgactgttcctctgttaccctttgactcagcaccacattgcctcatttatttcccctgcattttgtataaatccaccttgttgaagaattcttctgaggtcatgtgcctcagaagacttcagatcaataggtcccaagacgttacattttccaatgaagtaacaacagacgacatattgtgatccgttgacctgcaggtcgac

SEQ ID NO: 286 - DNA, 386 bp, human
  misc_feature (155)..(155): n is a, c, g, or t
  misc_feature (266)..(266): n is a, c, g, or t
  misc_feature (280)..(280): n is a, c, g, or t
  misc_feature (295)..(295): n is a, c, g, or t
  misc_feature (304)..(304): n is a, c, g, or t
  misc_feature (330)..(330): n is a, c, g, or t
  misc_feature (354)..(354): n is a, c, g, or t
  misc_feature (375)..(375): n is a, c, g, or t
gggaataagcttgcgaccgcttaattaaagatctttttttttttttttttttttttttaagattcaagtcaaaattgttttattgtcactcacatatttaacataaaaagaaatgcagcaaatggctcagtatcgtattgaaaaaaaatccaggntgtgcagcttgttctattaacatctgggagaagagctgttcccacatcaggtcacagcagctgcagttctccaacgtccctttgcagtacacagccgtgggcacacttggncacagcccacgggncagacaggtagcagncagctcttnctttgcagggagggtgcatttgcctnctttgcacttgcagggagccggtncaggttttagggagacacccnttgggtccagg

SEQ ID NO: 287 - DNA, 570 bp, human
  misc_feature (474)..(474): n is a, c, g, or t
gaagggtatagaaaatacatttttaattttgatagagttcacaaatgacagcattgacatttctttaaacaaatacttctgtcaaggcacagcattaccatgtgtccccagatgcccaagaggcagtgatttcatgtccccctgaggtttagcagagccaccaatgtcaatagggtggctgacggggcctagatttgctaccagataagccaatgagacatgctgtcagatttatggttacataatcaagtatttaaaaagatgcacaataggtaactgcaatgagcttgttctgcatttagcaatagttcctttcaaacaaagaagatagttttcagtatcaagaaggatgcctatatgtatgtcttccatggagcctttcctacaaattgctttcattacacattaaaaggagttcagctttattgtgacgttcttgagtcattcagctgctcaggcttgaaggtccctgcngcgcctgccaaaggctttggaacccacattggtgggcacaaagttgttcttcaccacaccccctgatctgctcagcaaagctgccagccgatgagt

SEQ ID NO: 288 - DNA, 588 bp, human
  misc_feature (565)..(567): n is a, c, g, or t
ctcctcttgccttaaatttcccagcatgttgaaggcaggtcataggaccataggcaaggaaggaaaattaatacttaattgagcacccactaggtatgcctgctctgtgaacataccctgtggagatccccatttttacagataatcaggttgaggtttagaggggtaacttatcctaataagtctcatagctagtaaaaggcagaaccaggcacaaaaatcaagcagggaaggaaccaaccaggattcacatgttgtataacactctaaagtctattctctccatgatataccctaaactgccttctatggaacaaaaaactagacaagtgctagaatatgcaacattcagttttattgaccccaggatgggacaaggaaaggaagccttccagaccagctcacttaaaggagacgggttaagtgagtcatctcatgactggggcaactgctaccaagccccaaacctcaacctgaccacctgatgtgttatctcttatcttagaccaggggttgccatctatattatattttttagatggagtctcacccttccccagtgggnnncttcctgagtccttcccgtgg

SEQ ID NO: 289 - DNA, 5067 bp, human
ctcctccccatcctctccctctgtccctctgtccctctgaccctgcactgtcccagcaccatgggacccacctcaggtcccagcctgctgctcctgctactaacccacctccccctggctctggggagtcccatgtactctatcatcacccccaacatcttgcggctggagagcgaggagaccatggtgctggaggcccacgacgcgcaaggggatgttccagtcactgttactgtccacgacttcccaggcaaaaaactagtgctgtccagtgagaagactgtgctgacccctgccaccaaccacatgggcaacgtcaccttcacgatcccagccaacagggagttcaagtcagaaaaggggcgcaacaagttcgtgaccgtgcaggccaccttcgggacccaagtggtggagaaggtggtgctggtcagcctgcagagcgggtacctcttcatccagacagacaagaccatctacacccctggctccacagttctctatcggatcttcaccgtcaaccacaagctgctacccgtgggccggacggtcatggtcaacattgagaacccggaaggcatcccggtcaagcaggactccttgtcttctcagaaccagcttggcgtcttgcccttgtcttgggacattccggaactcgtcaacatgggccagtggaagatccgagcctactatgaaaactcaccacagcaggtcttctccactgagtttgaggtgaaggagtacgtgctgcccagtttcgaggtcatagtggagcctacagagaaattctactacatctataacgagaagggcctggaggtcaccatcaccgccaggttcctctacgggaagaaagtggagggaactgcctttgtcatcttcgggatccaggatggcgaacagaggatttccctgcctgaatccctcaagcgcattccgattgaggatggctcgggggaggttgtgctgagccggaaggtactgctggacggggtgcagaacctccgagcagaagacctggtggggaagtctttgtacgtgtctgccaccgtcatcttgcactcaggcagtgacatggtgcaggcagagcgcagcgggatccccatcgtgacctctccctaccagatccacttcaccaagacacccaagtacttcaaaccaggaatgccctttgacctcatggtgttcgtgacgaaccctgatggctctccagcctaccgagtccccgtggcagtccagggcgaggacactgtgcagtctctaacccagggagatggcgtggccaaactcagcatcaacacacaccccagccagaagcccttgagcatcacggtgcgcacgaagaagcaggagctctcggaggcagagcaggctaccaggaccatgcaggctctgccctacagcaccgtgggcaactccaacaattacctgcatctctcagtgctacgtacagagctcagacccggggagaccctcaacgtcaacttcctcctgcgaatggaccgcgcccacgaggccaagatccgctactacacctacctgatcatgaacaagggcaggctgttgaaggcgggacgccaggtgcgagagcccggccaggacctggtggtgctgcccctgtccatcaccaccgacttcatcccttccttccgcctggtggcgtactacacgctgatcggtgccagcggccagagggaggtggtggccgactccgtgtgggtggacgtcaaggactcctgcgtgggctcgctggtggtaaaaagcggccagtcagaagaccggcagcctgtacctgggcagcagatgaccctgaagatagagggtgaccacggggcccgggtggtactggtggccgtggacaagggcgtgttcgtgctgaataagaagaacaaactgacgcagagtaagatctgggacgtggtggagaaggcagacatcggctgcaccccgggcagtgggaaggattacgccggtgtcttctccgacgcagggctgaccttcacgagcagcagtggccagcagaccgcccagagggcagaacttcagtgcccgcagccagccgcccgccgacgccgttccgtgcagctcacggagaagcgaatggacaaagtcggcaagtaccccaaggagctgcgcaagtgctgcgaggacggcatgcgggagaaccccatgaggttctcgtgccagcgccggacccgtttcatctccctgggcgaggcgtgcaagaaggtcttcctggactgctgcaactacatcacagagctgcggcggcagcacgcgcgggccagccacctgggcctggccaggagtaacctggatgaggacatcattgcagaagagaacatcgtttcccgaagtgagttcccagagagctggctgtggaacgttgaggacttgaaagagccaccgaaaaatggaatctctacgaagctcatgaatatatttttgaaagactccatcaccacgtgggagattctggctgtcagcatgtcggacaagaaagggatctgtgtggcagaccccttcgaggtcacagtaatgcaggacttcttcatcgacctgcggctaccctactctgttgttcgaaacgagcaggtggaaatccgagccgttctctacaattaccggcagaaccaagagctcaaggtgagggtggaactactccacaatccagccttctgcagcctggccaccaccaagaggcgtcaccagcagaccgtaaccatcccccccaagtcctcgttgtccgttccatatgtcatcgtgccgctaaagaccggcctgcaggaagtggaagtcaaggctgccgtctaccatcatttcatcagtgacggtgtcaggaagtccctgaaggtcgtgccggaaggaatcagaatgaacaaaactgtggctgttcgcaccctggatccagaacgcctgggccgtgaaggagtgcagaaagaggacatcccacctgcagacctcagtgaccaagtcccggacaccgagtctgagaccagaattctcctgcaagggaccccagtggcccagatgacagaggatgccgtcgacgcggaacggctgaagcacctcattgtgaccccctcgggctgcggggaacagaacatgatcggcatgacgcccacggtcatcgctgtgcattacctggatgaaacggagcagtgggagaagttcggcctagagaagcggcagggggccttggagctcatcaagaaggggtacacccagcagctggccttcagacaacccagctctgcctttgcggccttcgtgaaacgggcacccagcacctggctgaccgcctacgtggtcaaggtcttctctctggctgtcaacctcatcgccatcgactcccaagtcctctgcggggctgttaaatggctgatcctggagaagcagaagcccgacggggtcttccaggaggatgcgcccgtgatacaccaagaaatgattggtggattacggaacaacaacgagaaagacatggccctcacggcctttgttctcatctcgctgcaggaggctaaagatatttgcgaggagcaggtcaacagcctgccaggcagcatcactaaagcaggagacttccttgaagccaactacatgaacctacagagatcctacactgtggccattgctggctatgctctggcccagatgggcaggctgaaggggcctcttcttaacaaatttctgaccacagccaaagataagaaccgctgggaggaccctggtaagcagctctacaacgtggaggccacatcctatgccctcttggccctactgcagctaaaagactttgactttgtgcctcccgtcgtgcgttggctcaatgaacagagatactacggtggtggctatggctctacccaggccaccttcatggtgttccaagccttggctcaataccaaaaggacgcccctgaccaccaggaactgaaccttgatgtgtccctccaactgcccagccgcagctccaagatcacccaccgtatccactgggaatctgccagcctcctgcgatcagaagagaccaaggaaaatgagggtttcacagtcacagctgaaggaaaaggccaaggcaccttgtcggtggtgacaatgtaccatgctaaggccaaagatcaactcacctgtaataaattcgacctcaaggtcaccataaaaccagcaccggaaacagaaaagaggcctcaggatgccaagaacactatgatccttgagatctgtaccaggtaccggggagaccaggatgccactatgtctatattggacatatccatgatgactggctttgctccagacacagatgacctgaagcagctggccaatggtgttgacagatacatctccaagtatgagctggacaaagccttctccgataggaacaccctcatcatctacctggacaaggtctcacactctgaggatgactgtctagctttcaaagttcaccaatactttaatgtagagcttatccagcctggagcagtcaaggtctacgcctattacaacctggaggaaagctgtacccggttctaccatccggaaaaggaggatggaaagctgaacaagctctgccgtgatgaactgtgccgctgtgctgaggagaattgcttcatacaaaagtcggatgacaaggtcaccctggaagaacggctggacaaggcctgtgagccaggagtggactatgtgtacaagacccgactggtcaaggttcagctgtccaatgactttgacgagtacatcatggccattgagcagaccatcaagtcaggctcggatgaggtgcaggttggacagcagcgcacgttcatcagccccatcaagtgcagagaagccctgaagctggaggagaagaaacactacctcatgtggggtctctcctccgatttctggggagagaagcccaacctcagctacatcatcgggaaggacacttgggtggagcactggcctgaggaggacgaatgccaagacgaagagaaccagaaacaatgccaggacctcggcgccttcaccgagagcatggttgtctttgggtgccccaactgaccacacccccattcc

SEQ ID NO: 290 - DNA, 2943 bp, human
ccctaatcaagtaccccctcctcctccaccacctcctgccccacccctccctgcatctggattctttttggcatccatgtcagaagacaatcgccctttaactggacttgcagctgcaattgccggagcaaaacttaggaaagtgtcacggatggaggatacctctttcccaagtggagggaatgctattggtgtgaactccgcctcatctaaaacagatacaggccgtggaaatggaccccttcctttagggggtagtggtttaatggaagaaatgagtgccctgctggccaggaggagaagaattgctgaaaagggatcaacaatagaaacagaacaaaaagaggacaaaggtgaagattcagagcctgtaacttctaaggcctcttcaacaagtacacctgaaccaacaagaaaaccttgggaaagaacaaatacaatgaatggcagcaagtcacctgttatctccagaccaaaatccacacccttatcacagcccagtgccaatggagtccagacggaaggacttgactatgacaggctgaagcaggacattttagatgaaatgagaaaagaattaacaaagctaaaagaagagctcattgatgcaatcaggcaggaactgagcaagtcaaatactgcatagaggaacagactaaggagagataggactttaatctggaggaaaaatatcctacaaacaacaactgttcacaacagcaaacccctacatttatgagctgtaagaagaaaatggagacaaacagaaggagggaaaaaccaacctactctgaaagccttcagacattatgactctggtgataagctctttccctctccgtttgctgcttttttctggcctttacaacagaatggaagagaatcatttaagagttcctgtaacagttatgcagaaaatactaaaacccatcaggcaagatcaccacgcattgaaatattttcatatcaagataaagtcgcacattttccacaatacattgctaaaataaagaggagaaaggcttaggaagtttttctgcagagagtgctggtaaagaattgagcaagtttgctattgtattgtaatgtttctctcaggtttgttcttcctatcatgtttgatattccatgaataattgagatcagccctatgtaagttaagatcataatatgtggaacaaatggaattgtaagtgctttcaaagggtaatatttataagaaagtgtccgaaaaatgtttcttcagcttgagaaattttagaatgataggaagtttctcgagttagccttcatgcaattttgtagattaaaacataaaatttgtccagaacttaaagatttagatgccttcctaaattgttacaatgctttaccaaatctatgacttctacataacacaaaccagtggtcaaatgtaaacactatattgtagatttactgtaggttttcaaccttttttagatttatgcatgtggacatttttataatgtaattacaatcaccacaaggttagcttttttaattgcagacagtaatgcatgtcacactaatatgtagtggccttttcaaggcctagtcccagggaaaacattttgtagagtataggggagtgggaggaaggggaggaataattttttatttaaagttgatttctgcactatctttttctcagttacctgcatgaataaataatgagaaatattttgtgactttaattggtaaatatgttacaaaaccaagtacttaatcttttacatcatgtcttcagctatttgtattttaaccagtaatttcaatggtctgaaacatgattctgagcttcacataatatcttaactgtggaactcaaaagtttgatcactgaatttggcagttattattacctaggtacccccgctgttacacaggtgtttagatacgtgttcctgaatgaagctgcttttgaattttgttatgttgaaatgcaagaaataacaatgatggcagcaattaaggtcacagaaatcattaggtaaaggaaaaccaatgaggagttctgcagttttcttttaataagtaaagtgagacttgggtggtgggaagaaggaaggtgggaagaaggaattagacactctgcctgccactctgcgtgtgtgtgctctcgcgcacgtgctgtctatatggaagccactcccttttctttcctttgaaactggtaaggttaaaataggggagaaatcctacatgttggaatgatagctttttggaaaatttaagaaactctccaggctctccatcttgatttatgcttgagttgttatgtgccatatttgctttgaactctgattatcagaagttttactaaaactttgaaataattcactttcatctgctttctagattttgtacatctcagtccataaagcaaagcttgttgatagtgtagttttctaaacgctgcaaatttgcagcctttaccactacaaagaagtttggatgagggattttttttttctttgtcaaaatagttcctgtttctgtagaaatttcatttttagattaaactgtgatggatgggctatcataattcaagtatacatttcttttttctatcagatattcattgtcatgcagtagtagtaaaaacatcaaagatgcagcaagcttattaagtattattttctaaaagaaataggaggcattttcatctttattattgtacttttggttatgcaaacactttgataatataaacagttatgtcccctataaatctggtcagcaacctcttttgattttgttgggtaagttaaatagtctgtagtaggtagagtactgggtacaagtggtccaaactaagataagagactaaaataaaatgctaaatcttaaaagaaactgggtttatgcactaaacgttttgtgccttggtctaatattaacatgatgtatgtgtaaactgac

SEQ ID NO: 291 - DNA, 1141 bp, human
tccttgggttcgggtgaaagcgcctgggggttcgtggccatgatccccgagctgctggagaactgaaggcggacagtctcctgcgaaaccaggcaatggcggagctggagtttgttcagatcatcatcatcgtggtggtgatgatggtgatggtggtggtgatcacgtgcctgctgagccactacaagctgtctgcacggtccttcatcagccggcacagccaggggcggaggagagaagatgccctgtcctcagaaggatgcctgtggccctcggagagcacagtgtcaggcaacggaatcccagagccgcaggtctacgccccgcctcggcccaccgaccgcctggccgtgccgcccttcgcccagcgggagcgcttccaccgcttccagcccacctatccgtacctgcagcacgagatcgacctgccacccaccatctcgctgtcagacggggaggagcccccaccctaccagggcccctgcaccctccagcttcgggaccccgagcagcagctggaactgaaccgggagtcggtgcgcgcacccccaaacagaaccatcttcgacagtgacctgatggatagtgccaggctgggcggcccctgcccccccagcagtaactcgggcatcagcgccacgtgctacggcagcggcgggcgcatggaggggccgccgcccacctacagcgaggtcatcggccactacccggggtcctccttccagcaccagcagagcagtgggccgccctccttgctggaggggacccggctccaccacacacacatcgcgcccctagagagcgcagccatctggagcaaagagaaggataaacagaaaggacaccctctctagggtccccaggggggccgggctggggctgcgtaggtgaaaaggcagaacactccgcgcttcttagaagaggagtgagaggaaggcggggggcgcagcaacgcatcgtgtggccctcccctcccacctccctgtgtataaatatttacatgtgatgtctggtctgaatgcacaagctaagagagcttgcaaaaaaaaaaagaaaaaagaaaaaaaaaaaccacgtttctttgttgagctgtgtcttgaaggcaaaagaaaaaaaatttctacagtaaaaaaaaaaaaaa

SEQ ID NO: 292 - DNA, 386 bp, human
atgaggctcctggcggccgcgctgctcctgctgctgctggcgctgtacaccgcgcgtgtggacgggtccaaatgcaagtgctcccggaagggacccaagatccgctacagcgacgtgaagaagctggaaatgaagccaaagtacccgcactgcgaggagaagatggttatcatcaccaccaagagcgtgtccaggtaccgaggtcaggagcactgcctgcaccccaagctgcagagcaccaagcgcttcatcaagtggtacaacgcctggaacgagaagcgcagggtctacgaagaatagggtgaaaaacctcagaagggaaaactccaaaccagttgggagacttgtgcaaaggactttgcagattaaaaaaaaaaaaaaaaaaa

SEQ ID NO: 293 - DNA, 1237 bp, human
gaattcggcacgaggcctcgtgccggggagcaacctcagcttctagtatccagactccagcgccgccccgggcgcggaccccaaccccgacccagagcttctccagcggcggcgcagcgagcagggctccccgccttaacttcctccgcggggcccagccaccttcgggagtccgggttgcccacctgcaaactctccgccttctgcacctgccacccctgagccagcgcgggcgcccgagcgagtcatggccaacgcggggctgcagctgttgggcttcattctcgccttcctgggatggatcggcgccatcgtcagcactgccctgccccagtggaggatttactcctatgccggcgacaacatcgtgaccgcccaggccatgtacgaggggctgtggatgtcctgcgtgtcgcagagcaccgggcagatccagtgcaaagtctttgactccttgctgaatctgagcagcacattgcaagcaacccgtgccttgatggtggttggcatcctcctgggagtgatagcaatctttgtggccaccgttggcatgaagtgtatgaagtgcttggaagacgatgaggtgcagaagatgaggatggctgtcattgggggcgcgatatttcttcttgcaggtctggctattttagttgccacagcatggtatggcaatagaatcgttcaagaattctatgaccctatgaccccagtcaatgccaggtacgaatttggtcaggctctcttcactggctgggctgctgcttctctctgccttctgggaggtgccctactttgctgttcctgtccccgaaaaacaacctcttacccaacaccaaggccctatccaaaacctgcaccttccagcgggaaagactacgtgtgacacagaggcaaaaggagaaaatcatgttgaaacaaaccgaaaatggacattgagatactatcattaacattaggaccttagaattttgggtattgtaatctaaagtatgttattacaaaacaaacaaacaaacaaaaaacccatgtgttaaaatactcagtgctaaacatggcttaatcttattttatcttctttcctcaatataggagggaagatttttccatttgtattactgcttcccattgagtaatcatactcaaatgggggaaggggtgctccttaaatatatatagatatgtatatatacatgtttttctattaaaaatagccagtaaaaaaaaaaaaaaaaaaaaa

SEQ ID NO: 294 - DNA, 1909 bp, human
gacaccttttaaaatgcagaactaactgaggcatttcagtaactttgctttcaaatcaataaagtcaaatgtatggaaacattttgtgccctactctccataccctgtgtactcaaattctctactgtatgaattatgctttaagtagaattcagtgccaaggagaacttggtgaaataaattattttaattttttttttatcctttacaaagccatggattttatttggttgatgtgtgctctgtacacaagccatttcaataggatggagctgttaattattttccaaagagtaatagacatgcaaaagtttcaataaaaactgggccattaacaaataaattaataaactaataagcattcccttctaggtttttgccaaactgcctatccaataacaaatttgagaatcgttgaaaaagctagttatatttcagagaaatgattttcattattgaaactgttctccctagcaggccattttccctttttcctgggagtttagcaagtttaggagagaatagtcatgaaaagaaagggaagaaaggggagaagggaagaggttaaaaagtaagtgctcagacctatgaacgtaatccctttgctagaaatatttaagagcagctcagcttggttgaaactgagttttgtcatcttccatatttgcaggaaggtattttctgacttgcaatgcagctagatgtaaaattttattttatcatcctagaaagccttgactagaaaaatgaataaatattgagggtttcctgtccatatctggcttgcatgtgccagaaagcagagaatagaaaatgtaatctccaacatccaagcatcgaaacccaaggggtaggcaattctatgtaggttttggacatgaagtttggtgcatcttggtttatgctggctcaactgctattaaacctctctggcttatagtctcttcattctattagacaagcacgtatcgaacacttgcttcgcacaaggctctttagttaacaatttagcagctactgtttgtgttaaacacacttttcaccaaataggttctgaggcaaacgagagcaatgactatttaaagaaaggctttcccagcatcacttacacatcccaaaactaaaaagatcaactcttccaactgagaaaagactcctggctttgaatggaaacttacagcagagagtcacaggccacggcaacaacaacgacaacaacaaacatttggaatattattctcaactcacgttttaataatacatcttaattatttttctagtagagaaactacaaatcagcctcttcaacatttatatacagtttaataagcctcttgcaagttacttgttctctcacctgaggtatttttttcctccccaccttgcccctgttcctcccttcctcttctccctttgcaagaggaaatatttaacatatttgggtccaacttcaataatgtaataattaatacattaaaagcatttaacttcctttctagaaaaatgcacaggctaaggcatagacaaaacaaagagaaatgctgagaaatttgccactggagacaagcaatctgaataaatatttgccaaaagttctttttatgtcatatagtgtcaggatttgaaggagctattttttttaatgttgcaactagcaactcatcttcggaagacacagccaggagaatgaagtagaagtgaaaggtttataaatccatttgtaagcatttatcccatatattttaaattcaagaaaaattgtgtttatctttagaattttgtattcaatactttatgtactatgtgactcatgcttctggataaataaagcaccaaatatgtatctgtaaccacaatcacacatattatattaaatatatatctatataacaaaaaaaaaaaaaaaaaa

SEQ ID NO: 295 - DNA, 998 bp, human
gcggcgggcgcagacagcggcgggcgcaggacgtgcactatggctcggggctcgctgcgccggttgctgcggctcctcgtgctggggctctggctggcgttgctgcgctccgtggccggggagcaagcgccaggcaccgccccctgctcccgcggcagctcctggagcgcggacctggacaagtgcatggactgcgcgtcttgcagggcgcgaccgcacagcgacttctgcctgggctgcgctgcagcacctcctgcccccttccggctgctttggcccatccttgggggcgctctgagcctgaccttcgtgctggggctgctttctggctttttggtctggagacgatgccgcaggagagagaagttcaccacccccatagaggagaccggcggagagggctgcccagctgtggcgctgatccagtgacaatgtgccccctgccagccggggctcgcccactcatcattcattcatccattctagagccagtctctgcctcccagacgcggcgggagccaagctcctccaaccacaaggggggtggggggcggtgaatcacctctgaggcctgggcccagggttcaggggaaccttccaaggtgtctggttgccctgcctctggctccagaacagaaagggagcctcacgctggctcacacaaaacagctgacactgactaaggaactgcagcatttgcacaggggaggggggtgccctccttccttaggacctgggggccaggctgacttggggggcagacttgacactaggccccactcactcagatgtcctgaaattccaccacgggggtcaccctggggggttagggacctatttttaacactaggggctggcccactaggagggctggccctaagatacagacccccccaactccccaaagcggggaggagatatttattttggggagagtttggaggggagggagaatttattaataaaagaatctttaactttaaaaaaaaaaaaaaaaa

SEQ ID NO: 296 - DNA, 1943 bp, human
ggaagagggagaggaaaaaaatattgtatttttgaatcattgttgcaggagggggtgggaatcttaggatttgttgccagatttgaaagtcactggaacttgcatattttcattttaatcctaagtgttattacgcaccagttggggttcacccttcatccctcacatttaattgtctgatatagaatagtgttgtgtccactgccccgctagacggctttcttaggggaattttcttctggttgtttcacaagacagattctgtccttgtcacccgggacagaaaactcagtcttttcaccctcattcagatgaagggactcaggacaggctctgtgacttacagggacccaatcaattcacaatgagaaattaccggccaggcgtggtgactcacgtctgtaatcccagcactttgggagggcaaggcaagagcttgagcttgagcctagacgttaaagaccagcctgggcaacacagcaagacccatctctacaagaaatttaaaaactagccaggcgtggtggtgcgcgcctgtagtcccagctacttgggaggctgagccctggaggtcgaggctacagtgagctatgatcacaccattgcacttcagcctgggcgacacagcgagaccctgtctcaagaaagaaaaaaaaaagagacaaattacccagaaacccctcccttccccacatggaggccttggcaaatgttaattttcctagaaaatccttcagacctgaagacgcaggaaaagaatctggctctcagggtggcttctgcgtccccgccgccaggccccagactatggtcacagggccgtcctgttcctccccgggactccagaatttctctcctcaaaggaaagaaaacagggcatgcgcttgttggcaaaacgcagggccggctcccaaaaaccccatgtgtgtacgattaaaagttggccgtccccaggcctcccagcgcaaacttaaagagacagggctttgctgaaaaccaaacatgggccagctgggctttttaacaacctagagactttccggagctgcctggaacagagcctgtgggaaacggggcttgccagagacactcacagtttccttcatggcctgttttggtcccctaagaatctccacatcattgtctttcttgtgccttttccttggtgagcaacagaaagggaagggttccaagcctctaaaaatgtgctttgtgatcaggagtgcgctccaaaccaaatacgcgcgctgccctttcgaggccagtgagctcagcctccaaggctttaaagccacatttcagcaagagaaagcgctgagagctcgcaggttcattaaagaaggcaaagcactggtttctctccttagaaaagtaggtttcttggcttgatgtagactggcttgctttgatttttagtgaagggaatgtacgtaaaacaaaatagggcttggctggtcaaaggagacaagcaggatggatggatggatggatgaatagatagatggtgtttgcatgtaaattgcagagaaaacaaaaccaaagctgattggaaacaattaattgtgggtgtctgagggggaaggtcgcagctttgggcagctttgagaagcggtacaagagctctgtgcctgtgtgtccagccctggagccagccagtgcatttattttaagctcttagaagcaactccttggcccaggaatgcgtgacccctgagatgggtccacgcatctctctacacgtccttctctccgtgggatactggactcgtgcctctgcgcccattctcttctcacgcatatccatgagctttaatttcactttctgatcacggtacgtccataaagccagtattacacttaaatgaagtattcttttttgtaatcgtttttttttagaaggtaaaaaaatttaataaagctaccaataatgttgaaaaaaaaaa

SEQ ID NO: 297 - DNA, 4049 bp, human
gcggccgcactcagcgccacgcgtcgaaagcgcaggccccgaggacccgccgcactgacagtatgagccgcacagcctacacggtgggagccctgcttctcctcttggggaccctgctgccggctgctgaagggaaaaagaaagggtcccaaggtgccatccccccgccagacaaggcccagcacaatgactcagagcagactcagtcgccccagcagcctggctccaggaaccgggggcggggccaagggcggggcactgccatgcccggggaggaggtgctggagtccagccaagaggccctgcatgtgacggagcgcaaatacctgaagcgagactggtgcaaaacccagccgcttaagcagaccatccacgaggaaggctgcaacagtcgcaccatcatcaaccgcttctgttacggccagtgcaactctttctacatccccaggcacatccggaaggaggaaggttcctttcagtcctgctccttctgcaagcccaagaaattcactaccatgatggtcacactcaactgccctgaactacagccacctaccaagaagaagagagtcacacgtgtgaagcagtgtcgttgcatatccatcgatttggattaagccaaatccaggtgcacccagcatgtcctaggaatgcagccccaggaagtcccagacctaaaacaaccagattcttacttggcttaaacctagaggccagaagaacccccagctgcctcctggcaggagcctgcttgtgcgtagttcgtgtgcatgagtgtggatgggtgcctgtgggtgtttttagacaccagagaaaacacagtctctgctagagagcactccctattttgtaaacatatctgctttaatggggatgtaccagaaacccacctcaccccggctcacatctaaaggggcggggccgtggtctggttctgactttgtgtttttgtgccctcctggggaccagaatctcctttcggaatgaatgttcatggaagaggctcctctgagggcaagagacctgttttagtgctgcattcgacatggaaaagtccttttaacctgtgcttgcatcctcctttcctcctcctcctcacaatccatctcttcttaagttgatagtgactatgtcagtctaatctcttgtttgccaaggttcctaaattaattcacttaaccatgatgcaaatgtttttcattttgtgaagaccctccagactctgggagaggctggtgtgggcaaggacaagcaggatagtggagtgagaaagggagggtggagggtgaggccaaatcaggtccagcaaaagtcagtagggacattgcagaagcttgaaaggccaataccagaacacaggctgatgcttctgagaaagtcttttcctagtatttaacagaacccaagtgaacagaggagaaatgagattgccagaaagtgattaactttggccgttgcaatctgctcaaacctaacaccaaactgaaaacataaatactgaccactcctatgttcggacccaagcaagttagctaaaccaaaccaactcctctgctttgtccctcaggtggaaaagagaggtagtttagaactctctgcataggggtgggaattaatcaaaaacckcagaggctgaaattcctaatacctttcctttatcgtggttatagtcagctcatttccattccactatttcccataatgcttctgagagccactaacttgattgataaagatcctgcctctgctgagtgtacctgacagtaagtctaaagatgaragagtttagggactactctgttttagcaagaratattktgggggtctttttgttttaactattgtcaggagattgggctaragagaagacgacgagagtaaggaaataaagggrattgcctctggctagagagtaagttaggtgttaatacctggtagaaatgtaagggatatgacctccctttctttatgtgctcactgaggatctgaggggaccctgttaggagagcatagcatcatgatgtattagctgttcatctgctactggttggatggacataactattgtaactattcagtatttactggtaggcactgtcctctgattaaacttggcctactggcaatggctacttaggattgatctaagggccaaagtgcagggtgggtgaactttattgtactttggatttggttaacctgttttcttcaagcctgaggttttatatacaaactccctgaatactctttttgccttgtatcttctcagcctcctagccaagtcctatgtaatatggaaaacaaacactgcagacttgagattcagttgccgatcaaggctctggcattcagagaacccttgcaactcgagaagctgtttttatttcgtttttgttttgatccagtgctctcccatctaacaactaaacaggagccatttcaaggcgggagatattttaaacacccaaaatgttgggtctgattttcaaacttttaaactcactactgatgattctcacgctaggcgaatttgtccaaacacatagtgtgtgtgttttgtatacactgtatgaccccaccccaaatctttgtattgtccacattctccaacaataaagcacagagtggatttaattaagcacacaaatgctaaggcagaattttgagggtgggagagaagaaaagggaaagaagctgaaaatgtaaaaccacaccagggaggaaaaatgacattcagaaccagcaaacactgaatttctcttgttgttttaactctgccacaagaatgcaatttcgttaatggagatgacttaagttggcagcagtaatcttcttttaggagcttgtaccacagtcttgcacataagtgcagatttggctcaagtaaagagaatttcctcaacactaacttcactgggataatcagcagcgtaactaccctaaaagcatatcactagccaaagagggaaatatctgttcttcttactgtgcctatattaagactagtacaaatgtggtgtgtcttccaactttcattgaaaatgccatatctataccatattttattcgagtcactgatgatgtaatgatatattttttcattattatagtagaatatttttatggcaagatatttgtggtcttgatcatacctattaaaataatgccaaacaccaaatatgaattttatgatgtacactttgtgcttggcattaaaagaaaaaaacacacatcctggaagtctgtaagttgttttttgttactgtaggtcttcaaagttaagagtgtaagtgaaaaatctggaggagaggataatttccactgtgtggaatgtgaatagttaaatgaaaagttatggttatttaatgtaattattacttcaaatcctttggtcactgtgatttcaagcatgttttctttttctcctttatatgactttctctgagttgggcaaagaagaagctgacacaccgtatgttgttagagtcttttatctggtcaggggaaacaaaatcttgacccagctgaacatgtcttcctgagtcagtgcctgaatctttattttttaaattgaatgttccttaaaggttaacatttctaaagcaatattaagaaagactttaaatgttattttggaagacttacgatgcatgtatacaaacgaatagcagataatgatgactagttcacacataaagtccttttaaggagaaaatctaaaatgaaaagtggataaacagaacatttataagtgatcagttaatgcctaagagtgaaagtagttctattgacattcctcaagatatttaatatcaactgcattatgtattatgtctgcttaaatcatttaaaaacggcaaagaattatatagactatgaggtaccttgctgtgtaggaggatgaaaggggagttgatagtctcataaaactaatttggcttcaagtttcatgaatctgtaactagaatttaattttcaccccaataatgttctatatagcctttgctaaagagcaactaataaattaaacctattctttcaaaaaaaaa

SEQ ID NO: 298 - DNA, 671 bp, human
aacccaatgatcctgcagcagcccttgcagcgaggcccccagggaggggcccagcgcctcccgcgggccgccttgggggtgacttggggcctggacgccagctcccctctccgaggagctgtgcccatgagcaccaagcggcgcctggaggaggagcaggagcctctgcgcaagcagtttctgtctgaggagaacatggccacccacttctctcaactcagcctgcacaatgaccacccctactgcagcccccccatgaccttctccccagccctgcccccactcaggagcccttgctctgagctgcttctctggcgctatcctggcagcctcatccctgaggccctccgtctgctgaggctgggggacacccccagtcccccctaccctgcaaccccagctggggacataatggagctctgagtgctggtggacagtgcccctcccaccttccttcttccccacaacagaagagaccagcgactcccgcaaagggacaaggttcctccctctcctgcagagtaggcatctgggcaccaagaccttccctcaacagaggacactgagcccaacggagttctgggatgggaggggtgggagcatgggaagggaggcatcccaccccccagaagaactgaataaagattgctgagcaaaaaaaaaaaaaaaaa

SEQ ID NO: 299 - DNA, 2887 bp, human
ttttgcgctcggaccttcgccagaggggccgggacatcatgacggtgggagccaggctccgaagcaaggcggagagcagcctcctgcgccgcgggccccgagggcgagggcgaaccgagggggacgaggaggcggccgccatcctggagcacctggagtacgcggacgaggcggaggcggcggccgagagcgggacgagcgcggcggacgagcggggcccggggacccggggcgcgcggagggtgcacttcgccctcctgcccgagcgctacgagccactggaggagccggcgccgagcgagcagcccaggaagaggtaccggaggaagctgaagaagtacggcaagaatgtcgggaaggtcatcatcaaaggatgccgctacgtggtcatcggcctgcaaggcttcgctgcagcctactccgccccgtttgcggtagccaccagcgtggtatccttcgtgcgctaatgggagctgctgtggcaggtgcccccagagtgaacgggagcccctgctgtgggaactttgtgaatcctggagcatctcagacttgaacacacagcatatttggaagagaaaacatgcctttctttgttgaatcacattagtatgatgagtgagtcatccctgcccatctgctgagcttctcacatctctcagtcacacgtggacccagtggtcaatcctgcagagaattcggcggaggttaggtttgggagtggagctagcgtgctaaagccagagccttcacgtgaaggtggcaggcactggggcggaagccaacactcaacagatgcaagcagtgtgggtgtgcagcagaacagtgatcttgggggaggaagaggatgttactagagtcagatgatttgctgtattctcctgaaaggtcgtaggctgacaggcgctcacattccttggctgcctcggttctgagggcagctaaggagctgtttattcctcaagtcatgctccccgatctccttcctctaccactctgtcaccaggagtttaattacaggcttgaggagaagaaaggaagaaaagatatcttgatgctttgaaaactgtgttggcagtgtggcatgactgtttaaagtagataaaaccttgtcattttaccccatccctgcatgactgtgaagctggcgaggaaggaggaagaagggcaagttcagatgcaggctgggtggctgggacaggttggctaagggactactctggagggctcttctgcctggcattgcccacttcggcccagccacgtgtttgcagcgaccagagtccctgcaaaggtgtggctggctgtggtcagggtgctactagcaccatcagcgcactcccgccattggctcagctcctctctgccagtccaactaagagtgctttgtcctgggtgggacataggggctgagagagatggggggagacataacacccaggaatgaaaatacagatttagagaaggaaccagtaagtaggagacagatgtgaaggaaatggaaatgaggcaagaggacattggaagagagaagtttgctgtccaggagccaggtctggagcatcagtgtgagggagttcaggtaggctgggcctgtgcctctaggtagggacaagggaggctgggtagccagggctggtgcttaaaacccctgaggccatgagctcattggctgcctttgtagcatcctgtcttcttctgtgctgcctggtttgatctcatctcacctggattcaaagggtaaggtgggcatgggtcttgggcctgacacccaccaaggatgacctgtggactgccatcggatgctgaacagggagatgaaaggaggtcctcttaccatacccctctgccaaccccccagtaggccactgttctgactttgtttccagaatatccagaaatccaaaggggctgttgctgaacagtctgcaggaccagtgacagcacctacctgttgtcccaaggcatacaaaggaggcctcaacgctcatgcttctctaatcaagccctaccaagacagacagaaagacagacagaaaaaaggaaggggtagaggagaaggttgaagctgtggagctagactctgcttcacttcctgaagcttcaacttcatgtcgaagattcactgggacccaattcctgcattgttaatatttgtgaggaaaagtgaaacaagtgatctggttttagcccagatgatgaaagtggatatggcacattttcacacacgtgagataattacagcttgccccacaacactgggtgttggagaaagggagagatagtcataagtggaagaaaaagccaagcatagtgagtgggaaggagagtgagagcctgtgcaggctgctgacgagccccaggcagcccacaagtttctcgtggggagatggaggcagagcccagggtaggggacagagctgctggggcctttccttgcctgggaatctgtcccaggaagagcttccccactcccatcccccaaattggaaaaaccgtacattcaagcctgtttggccctgaaattcttaagaatctggttaagaattaactcactaatgtcaaaagtcaaaacctcctaggggttgtcctgggagtcaggttcacgggtacagaagatgaatctcagatgtcactcaacctgagccgtcattctctgtggcagggctgccctgggtttctcttactcaatccctggagtgtaagcatttggattgtgtcacagattacctttttaccttttctttctttttttttctttttttcaatatcagtgcccacaccttactgagtattgagttttagagctttcgcttgatgtgcttgaccaagagacttcttttgtatccttttcttgtcctatgatgtaaataaaagcctcgatttatgt

SEQ ID NO: 300 - DNA, 2886 bp, human
tgtttggtatatttaaagcagtgactgagtgtgtttgagtgagtggctgagtgcagtgtcttttgtttaaacacactgcctcgtgtctttgtagctgattcagagagtttgaattgtggggtgggagactaacttcagctccaggctgcagtaatgtgttggtagttacacttgaggcatttttttgttgttgttaattaactctatagtctcaaactatttttgcaaatatatcatttttcctaattggttcttgacgtgcagtggactggctctgtgaatgattggcagggtcttagttttgcgagagcatttccttctaagaattattgtgatctgcagaaacagccatttgattcaaaaatcatgtagaaaaggagtaggagaagcaaaacgtttcatttttgggccttaaccatttgaaatgtttggactttaaacataaagccatggagtttataaagccaagtaaccatttgatatggataataatatctactctagagagagtatatatatgcacattgatttttaatgctgttaagatacttttgtaaaactgtaggaacaagagtaattagaccaaattgaagcttaggggacagtaaagtggttgctttccatttagggtaaccatgcatgtggttagtcctctcctcctgagattcagaaccagttgactgtccccttaggtgtataaggagaaaagttgacatgtctgggacctctgacatgtgtacacatgcttgcacacatgcacacacagtgaatgttttaagttatacaaacataagaccttaagatgcaaagagccagaatattctaaagaggtgatgaacagagggggtggaaactgcatcacagatgttttccaagggccagggtggaatctgagctctagtgtctgactttgagatgcattatatttttaacacataaatgaggggatccatatcacattctttcttgtggaccaccaaattgaaggctttcttgtaattcacaagcagcagctctccagcatctctccgtagcctgggtgaagtcccagaagctggtgtgcatcattttccaaggtggcagagctgcttgctctgcagatcattcctttgagagaggagtacaagtgaagaaacaaggaggcacttcctgtaggagcactgatgtgccttgtccacactcccctctgagctttactggtaagagagctccgactgaacatgctgagcagttgagcacttttccatcagcaacaacagcgaggatggaaatggaaaggaaccgaactaaaatgcatttccctttgcagggcagagagctaagctcttaggaatagtgttatagaaataagcaccctaacttcaattcctgaaaatgttggttaatggagagaattttggagtttcacttaatattttcccatcggtcgccataaataagtcttcaggcgctcctagaagagtcccagcccaaggctcgattaaggaccacactgcaggtctgaggctcactgctctgagtcctgaacaccagagccctgcagagagtggtgataacacatcatctctgcaaagaggaacctctcccccggccgccacttcactcaggcttctactgagcagcaaggacagcctgggtttcaaatgccacttcccctgctttagggatccaggtgtcctgatagcgtgaccctgctgaggcaaggtatcaactccgagagtgactgagtcactgagcgtggcacatgaacaaacgtcatgacaaagattctctgagtgaagttaacaccacgtattttacctttgcaaaaaacaaactggcaccctgagttctaactacggacggacgatatctttgcctccacacccagattcctggaaatggctaacgtttcctttctaggggaagggtcgaggaatactcaagtgctagcttagcagctttgttcagtccagatcagagctgttaggtaaaggcctaaccacctccctgcagtctcttatatctcaagctttaggaacccatttctaaatgtacactagcggagaatttatattgtcagccttgattaccataggacaggcagaaaggcgataatttgtatcttttaatataaaagaagcttttaacttttccagcctattataataactgagttatattcactgtggctcaaactaattggcattgtggaacatttctttaccttcaaagttttctccaccaatcatttcagttctattgcagtcctggtgccatatgtcccctgcaaattgtgaaagtaattagtgacaaaatagcagcctgctccttttcaatggcgaaactgtcggcattagcagttttgggtaagctggcggtactataacacgtactggaaacctgttcctcatcaccacctaccagattctggaaatgccgtcttctagaaaacgatggcgtttgtggtggtcttcttttgaaaggaacagtaatttgtgtggatattgttaaagtgtttaaagaatattttgacaattaagtttacattttacaattgctttattttttattaaaatagttgtatataaatattaccctatttcactgttgttcaagtaaatctaaaccttgtagacaagtgagtcatctgatatgtatagaagctgtgatatatagagtacatttattgtgtaaatgtttatgaatataattgttcctgtgtttttataagttggggatattttgttgttttacggcaacaaaatttattgcatttaaatggtttttatgtaatagaaatcacgcaaaatagtgaaggatttaaaatatgtatatgatacatgtaaatgtacaaactttagaaagaaataaatccaacaaatttcaaaaaaaaaaaaaaaaaaa

SEQ ID NO: 301 - DNA, 2640 bp, human
cttggcacgaggctttgtgccacagccggcgacccggagccgagagcgggcggcggagcctgagctggacgcggccacgccggcgcggcgggatatgtggtgcctgtcataagctccagagagctgccttccacaagaccagcagaagagtgggcaaacatgaaatccaatcctgctatccaggctgccattgacctcacagcgggggctgcaggaggtacagcatgtgtactgaccgggcagccctttgacacaatgaaagtgaagatgcagacgttccctgacctgtaccggggcctcaccgactgctgcctgaagacttactcccaggtgggcttccgtggcttctacaagggtaccagtccagcactaatcgccaacatcgctgagaactcagtcctcttcatgtgctacggcttctgccagcaggtggtgcggaaagtggctggattggacaagcaggcaaagctgagtgatctgcagaatgcagccgccggttccttcgcctctgcctttgctgcactggtgctctgccccacggagctcgtgaagtgccggctgcagaccatgtatgagatggagacatcagggaagatagccaagagccagaatacagtgtggtctgtcatcaaaagtattcttaggaaagatggccccttggggttctaccatggactctcaagcactttacttcgagaagtaccaggctatttcttcttcttcggtggctatgaactgagccggtccttttttgcatcagggagatcaaaagatgaattaggccctgtacctttgatgttaagtggtggagttggtgggatttgcctctggcttgcggtatacccagtggattgtatcaaatccagaattcaagttctttccatgtctggaaaacaggcaggatttatcagaacctttataaatgttgtgaaaaatgaaggaataacggccttatattctggactgaaacctactatgattcgagcattccctgccaatggagcactctttttggcctacgaatatagcaggaagttgatgatgaaccagttggaagcatactgaagtgtcttggtgggcctgagccaagcacaggtgtttgaggactacagttcatctcagggtttcttggagtacaagaccagtgtgaagttattctgatttcttgggaattttgctttttgtcttcccttctaccctacatcttaaactttatggaagaacctctattttgcatcatatcatttctgtccataattgtactgaaatagaaaagtgaccgctcttgctcttggtaaaatatagagtggtcagtagccttatgcacctaattcaaaaggtggaatatagttctgtcagggcttttacgtaaacctccacttgtacatgcaatttggacagttatgtgttgagggaaatacagtttggtaccttgtttatttcaaatatcagaaaaacccagaggtgatcatttctcatgaagatgcttataaatggttgcttaacccttctagatgtagggtctgcttaatgtgtgtacttttctaagtggtggcacgtgcctgtagtcccagctactcaggaggctgaggcaggagaatcgcttgaacccgggaggcagaagttgcagtgaactgaaattgtgccactgcactccagactgggtgacacagcgagacttcatctcaaaaaaaaaaagaaaagcaattgtacttaactatgccatatgtagtatgtattcactgaccaaaaattcactgaccaaccaaccaaactccacacttcatctgatcccccatagacttggggatggacagctgttctttggccatatggtataagaggatcattcttgtcactacttaagttagcctcatcattttgtgctgctccaacaccagcagggtatctcccaataaagtgttcctaagcagcctgtatactgagtgcaagcaggctaacaattttaataatagtccataccatgtatgtgtttctgtcagcagaatgtacatgttgtacaaaacctccaggttccttaagctttttgctgtccatgaatcctctgtggcaactgtaatcacagagccagaagccagagggccagggatatgagaggctgacaaacatcaggggacatctggggaggagatccctgtcatgtctcttgtgccatggagctattatggctggtcttccatttgctttttctttaagtgaaaaccatttttctactttgcttttctctccatacttaaatggtcagtagctactgagtggtgctttatctgaataggcctggatcgaagtaaaatagaaatgggactggctttccacaggaagtaaactgcttcagagcccacagtcccctgctcagtgtccggaaagaagtcagtcatccctgttggcagtaaatcttcccacaggccgtccattagagatttaactagatatgttcaatagaaagagtctgaggcaagtggaaatgaggaacggaaacttaggttgggagaatattttttttttattcattctgtttgcttaattcagagtacagtttgtgctatttcatatctgtactccaggcagaaatataacttgaaaatactgtgtctaaagaaatttcagtggtctatcatt

SEQ ID NO: 302 - DNA, 2256 bp, human
tcagagtccggctcaggctccggctgcggctccagcccgcgatgccccattccgtgaccctgcgcgggccttcgccctggggcttccgcctggtgggcggccgggacttcagcgcgcccctcaccatctcacgggtccatgctggcagcaaggctgcattggctgccctgtgcccaggagacctgatccaggccatcaatggtgagagcacagagctcatgacacacctggaggcacagaaccgcatcaagggctgccacgatcacctcacactgtctgtgagcaggcctgagggcaggagctggcccagtgcccctgatgacagcaaggctcaggcacacaggatccacatcgatcctgagatccaggacggcagcccaacaaccagcaggcggccctcaggcaccgggactgggccagaagatggcagaccaagcctgggatctccatatggacaaccccctcgctttccagtccctcacaatggcagcagcgaggccaccctgccagcccagatgagcaccctgcatgtgtctccaccccccagcgctgacccagccagaggcctcccgcggagccgggactgcagagtcgacctgggctccgaggtgtacaggatgctgcgggagccagccgagcccgtggccgcggagcccaagcagtcaggctccttccgctacttgcagggcatgctagaggccggcgagggcggggattggcccgggcctggcggcccccggaacctcaagcccacggccagcaagctgggcgctccgctgagcggcctgcaggggctgcccgagtgcacgcgctgcggccacggcatcgtgggcaccatcgtcaaggcacgggacaagctctaccatcccgagtgcttcatgtgcagtgactgcggcctgaacctcaagcagcgtggttacttctttctggacgagcggctctactgtgagagccacgccaaggcgcgcgtgaagccgcccgagggctacgacgtggtggcggtgtaccccaatgccaaggtggaactcgtctgagctgggaccctgctcccacgcctgcttcttaaggtccctgctcggccggtgtaaatatgtttcaccctgtccctctaataaagctcctctgctccaccttgaacctgtcacctggcctgccaccctcctgcgcaggccatgcatggctcccgagtacagtagtatctgcttaggtgccaggcatgtcctaggctctgggtgcagtagtgagcaggacgggtaccatgctgccctgaaggggccacagcctgggtggaaggcagacctgaatcacaacgggccagctctagtaatacgaaggtgaggtctgggatgctgcgtgcggcgcgacgacaggaggtatgacctgggtggggtcagggaaagtcttagctgagaactaagagatgagggaggcacaaactctgcacgggggaactgtgtgtgcaaaggtgagctgggggcgagaaaggcctctgtggccgtcatcggcactagcgggttgggggtggtggtggggtgctggcagcctcaggagcgatcgctcccctggagagggtgattgagtgtggagatcaccggggccgccgcgggccgtctgcacttctgttccaggtttttctggcattttctgttccaggtttcttccacccacgagcactttattctcctccgagacccccttttcttccccttcctctctcccaccagggggcgcgcttaaatttccagacagagaccagaaggaaggtttagaaagaaaagaacacttgcccagggcagctttgccctccaagaggctccctcctgtctctaagtcaattccacccctcctcgaagtcccggcttccacccctctcctcagagtcccggcgtttacctcgtggtgtgtttgccttgggcctttcatgccccggctgcacacatcgtctgtgaattgtggctgttcactcccgaggatgtgtcctagactccgggtcgcgtggatctaccctctagtttacttgctcgggagaagaaactgactcgttttatttagtgcctatttagcgagcccagagtaacgtacatttgtgctgttttcaattttgtgctatcgcaaatcacaaaaaaactgttatcaattcacattcatcatcagcacgagacccatttccttgtgctcctgccagctcaggatattatgtttcttttttcatttttgccagtctgttaagtaaaatgtcatatgcgtttgttttaa

SEQ ID NO: 303 - DNA, 2161 bp, human
aaaagcgagccatggctgtctacgtcgggatgctgcgcctggggaggctgtgcgccgggagctcgggggtgctgggggcccgggccgccctctctcggagttggcaggaagccaggttgcagggtgtccgcttcctcagttccagagaggtggatcgcatggtctccacgcccatcggaggcctcagctacgttcaggggtgcaccaaaaagcatcttaacagcaagactgtgggccagtgcctggagaccacagcacagagggtcccagaacgagaggccttggtcgtcctccatgaagacgtcaggttgacctttgcccaactcaaggaggaggtggacaaagctgcttctggcctcctgagcattggcctctgcaaaggtgaccggctgggcatgtggggacctaactcctatgcatgggtgctcatgcagttggccaccgcccaggcgggcatcattctggtgtctgtgaacccagcctaccaggctatggaactggagtatgtcctcaagaaggtgggctgcaaggcccttgtgttccccaagcaattcaagacccagcaatactacaacgtcctgaagcagatctgtccagaagtggagaatgcccagccaggggccttgaagagtcagaggctcccagatctgaccacagtcatctcggtggatgcccctttgccggggaccctgctcctggatgaagtggtggcggctggcagcacacggcagcatctggaccagctccaatacaaccagcagttcctgtcctgccatgaccccatcaacatccagttcacctcggggacaacaggcagccccaagggggccaccctctcccactacaacattgtcaacaactccaacattttaggagagcgcctgaaactgcatgagaagacaccagagcagttgcggatgatcctgcccaaccccctgtaccattgcctgggttccgtggcaggcacaatgatgtgtctgatgtacggtgccaccctcatcctggcctctcccatcttcaatggcaagaaggcactggaggccatcagcagagagagaggcaccttcctgtatggtacccccacgatgttcgtggacattctgaaccagccagacttctccagttatgacatctcgaccatgtgtggaggtgtcattgctgggtcccctgcacctccagagttgatccgagccatcatcaacaagataaatatgaaggacctggtggttgcttatggaaccacagagaacagtcccgtgacattcgcgcacttccctgaggacactgtggagcagaaggcagaaagcgtgggcagaattatgcctcacacggaggcccggatcatgaacatggaggcagggacgctggcaaagctgaacacgcccggggagctgtgcatccgagggtactgcgtcatgctgggctactggggtgagcctcagaagacagaggaagcagtggatcaggacaagtggtattggacaggagatgtcgccacaatgaatgagcagggcttctgcaagatcgtgggccgctctaaggatatgatcatccggggtggtgagaacatctaccccgcagagctcgaggacttctttcacacacacccgaaggtgcaggaagtgcaggtggtgggagtgaaggacgatcggatgggggaagagatttgtgcctgcattcggctgaaggacggggaggagaccacggtggaggagataaaagctttctgcaaagggaagatctctcacttcaagattccgaagtacatcgtgtttgtcacaaactaccccctcaccatttcaggaaagatccagaaattcaaacttcgagagcagatggaacgacatctaaatctgtgaataaagcagcaggcctgtcctggccggttggcttgactctctcctgtcagaatgcaacctggctttatgcacctagatgtccccagcacccagttctgagccaggcacatcaaatgtcaaggaattgactgaacgaactaagagctcctggatgggtccgggaactcgcctgggcacaaggtgccaaaaggcaggcagcctgcccaggccctccctcctgtccatcccccacattcccctgtctgtccttgtgatttggcataaagagctttctgttttcgaaaaaaaaaaaaaaaaaaaaa

SEQ ID NO: 304 - DNA, 798 bp, human
agtctttatgtctcttaacattcacacctactttttaaaaacaaatattattactatttttattattgtttgtcctttataaattttcttaaagattaagaaaatttaagaccccattgagttactgtaatgcaattcaactttgagttatcttttaaatatgtcttgtatagttcatattcatggctgaaacttgaccacactattgctgattgtatggttttcacctggacaccgtgtagaatgcttgattacttgtactcttcttatgctaatatgctctgggctggagaaatgaaatcctcaagccatcaggatttgctatttaagtggcttgacaactgggccaccaaagaacttgaacttcaccttttaggatttgagctgttctggaacacattgctgcactttggaaagtcaaaatcaagtgccagtggcgccctttccatagagaatttgcccagctttgctttaaaagatgtcttgttttttatatacacataatcaataggtccaatctgctctcaaggccttggtcctggtgggattccttcaccaattactttaattaaaaatggctgcaactgtaagaacccttgtctgatatatttgcaactatgctcccatttacaaatgtaccttctaatgctcagttgccaggttccaatgcaaaggtggcgtggactccctttgtgtgggtggggtttgtgggtagtggtgaaggaccgatatcagaaaaatgccttcaagtgtactaatttattaataaacattaggtgtttgttaaaaaaaaaaaaa

SEQ ID NO: 305 - DNA, 969 bp, human
tccggagccaggctcgctggggcagcatggcggggtcgccgctgctctgggggccgcgggccgggggcgtcggccttttggtgctgctgctgctcggcctgtttcggccgccccccgcgctctgcgcgcggccggtaaaggaaccccgcggcctaagcgcagcgtctccgcccttggctgagactggcgctcctcgccgcttccggcggtcagtgccccgaggtgaggcggcgggggcggtgcaggagctggcgcgggcgctggcgcatctgctggaggccgaacgtcaggagcgggcgcgggccgaggcgcaggaggctgaggatcagcaggcgcgcgtcctggcgcagctgctgcgcgtctggggcgccccccgcaactctgatccggctctgggcctggacgacgaccccgacgcgcctgcagcgcagctcgctcgcgctctgctccgcgcccgccttgaccctgccgccctagcagcccagcttgtccccgcgcccgtccccgccgcggcgctccgaccccggcccccggtctacgacgacggccccgcgggcccggatgctgaggaggcaggcgacgagacacccgacgtggaccccgagctgttgaggtacttgctgggacggattcttgcgggaagcgcggactccgagggggtggcagccccgcgccgcctccgccgtgccgccgaccacgatgtgggctctgagctgccccctgagggcgtgctgggggcgctgctgcgtgtgaaacgcctagagaccccggcgccccaggtgcctgcacgccgcctcttgccaccctgagcactgcccggatcccgtgcaccctgggacccagaagtgcccccgccatcccgccaccaggacttctccccgccagcacgtccagagcaacttaccccggccagccagccctctcacccgaggatccctaccccctggcccacaataacatgatctgagc

SEQ ID NO: 306 - DNA, 2079 bp, human
gagaggcagcagcttgttcagcggacaaggatgctgggcgtgagggaccaaggcctgccctgcactcgggcctcctccagccagtgctgaccagggacttctgacctgctggccagccaggacctgtgtggggaggccctcctgctgccttggggtgacaatctcagctccaggctacagggagaccgggaggatcacagagccagcatggtacaggatcctgacagtgatcaacctctgaacagcctcgatgtcaaacccctgcgcaaaccccgtatccccatggagaccttcagaaagtgtggggatccccatcatcatagcactactgagcctggcgagtatcatcattgtggttgtcctcatcaaggtgattctggataaatactacttcctctgcgggcagcctctccacttcatcccgaggaagcagctgtgtgacggagagctggactgtcccttgggggaggacgaggagcactgtgtcaagagcttccccgaagggcctgcagtggcagtccgcctctccaaggaccgatccacactgcaggtgctggactcggccacagggaactggttctctgcctgtttcgacaacttcacagaagctctcgctgagacagcctgtaggcagatgggctacagcagcaaacccactttcagagctgtggagattggcccagaccaggatctggatgttgttgaaatcacagaaaacagccaggagcttcgcatgcggaactcaagtgggccctgtctctcaggctccctggtctccctgcactgtcttgcctgtgggaagagcctgaagaccccccgtgtggtgggtggggaggaggcctctgtggattcttggccttggcaggtcagcatccagtacgacaaacagcacgtctgtggagggagcatcctggacccccactgggtcctcacggcagcccactgcttcaggaaacataccgatgtgttcaactggaaggtgcgggcaggctcagacaaactgggcagcttcccatccctggctgtggccaagatcatcatcattgaattcaaccccatgtaccccaaagacaatgacatcgccctcatgaagctgcagttcccactcactttctcaggcacagtcaggcccatctgtctgcccttctttgatgaggagctcactccagccaccccactctggatcattggatggggctttacgaagcagaatggagggaagatgtctgacatactgctgcaggcgtcagtccaggtcattgacagcacacggtgcaatgcagacgatgcgtaccagggggaagtcaccgagaagatgatgtgtgcaggcatcccggaagggggtgtggacacctgccagggtgacagtggtgggcccctgatgtaccaatctgaccagtggcatgtggtgggcatcgttagctggggctatggctgcgggggcccgagcaccccaggagtatacaccaaggtctcagcctatctcaactggatctacaatgtctggaaggctgagctgtaatgctgctgcccctttgcagtgctgggagccgcttccttcctgccctgcccacctggggatcccccaaagtcagacacagagcaagagtccccttgggtacacccctctgcccacagcctcagcatttcttggagcagcaaagggcctcaattcctgtaagagaccctcgcagcccagaggcgcccagaggaagtcagcagccctagctcggccacacttggtgctcccagcatcccagggagagacacagcccactgaacaaggtctcaggggtattgctaagccaagaaggaactttcccacactactgaatggaagcaggctgtcttgtaaaagcccagatcactgtgggctggagaggagaaggaaagggtctgcgccagccctgtccgtcttcacccatccccaagcctactagagcaagaaaccagttgtaatataaaatgcactgccctactgttggtatgactaccgttacctactgttgtcattgttattacagctatggccactattattaaagagctgtgtaacatcaaaaaaaaaaaaaaaaaaaa

SEQ ID NO: 307 - DNA, 4098 bp, human
atgctgcaaatgccgaagttaaatgaaatacctccggggagggcaggccgcagggaggctcggggggagggaagatggcctggacaaacaggtcctgaagctgcgaggctggagtggagggcgcaggggcaggcgggcggcgccagagctccatgggacagctggggaagctccaggctacctacacaacctggcccaggctggtcacggtgtcccccctccctgctctgtgccctctccttccagaaatccaccatggagagtaaggatgaggtcagcgacaccgacagtggcatcatcctgcagtctggccccgacagcccggtctccccaatgaaggagctgacccatgcagtgcacaagcagcagagggccctggaagcgaggctggaggcctgcctggaggagctgaggagactctgccttcgggaagcggagctgacgggcaccttgccagcggagtatcccctcaaaccaggggaaaaggcccccaaggttcgccgcaggatcggagcggcttacaaactggatgactgggccttgcacagagaggaccccctaagcagcctggagcgccagctggccctgcagctgcagatcacagaggcagcccgtcggctgtgcctggaggagaacctcagcaggcaggctcggcggcagcggaagcactccatgctgcaggaggagaagaagctgcaggagctccagcgctgcctggtcgagcggcggcgcaatagcgagccacctccggctgctgctctccccctgggccgagagctcagtgcctctgatgacagctccctgtcagatgggctcctcctggaggaagaggaatcccaagtgccaaaacctcctccagagtctccagccccaccttctcggcctctcccaccccaaacccttgagggtctgcagccaacaggacctgaggctgggagcccagaacgggctccagtccagaacagcccctggaaggaaaccagcctggaccacccctatgagaagcccaggaagtcttctgagccctggagcgagtccagcagcccagccaccacaccacaggatgggcccagtgcctccagcctgtggcttctggagcctgcctcctaccacgtggttcccatccgtggtgttcctggccagtggcagggccgcaccagtgccccagccacccctgagatacaggggaggaggggccagtcgcagtctctgagggtggattccttccgggcgggtcctgagggccgaggtcgcagcgcctttccccgccgccgccccactcactacacggtgacagtgccagattcctgctttcccgcgaccaagcccccgctgccccacgccgcctgccactcctgctcagaagacagtggctctgacgtctccagcatctcccaccccacttcgccgggcagcagcagccccgacatctcctttctgcagcctctctcccctcccaagacccatcgtcaccgcggggcctgggtcccagccggcagcagagagctggtcgcccaccaccccaagctactgctgccgcctggctatttcccggcggggcggtacgtggtggtggctgagagccccctgccgcctggcgagtgggagctgtgccgcgcagccccgggccctgcttacgaggaggagggcactcccctgcgctaccagcgtctggtgccctcccgcagccgcatcgtgcggacgccctccctgaaggacagcccggcaggccgggggctcagcaaggccgccgtgtccgaggagctcaagtggtggcacgagcgtgcacgcctccggagcacccgaccccactcactggaccgccaaggagctttccgggtcaggagcctgccccttgggagagagggcttcggacgagccctgggaccccgggcacaggtgcccacagtttgtgtgctgtggagatcgcctgatggggcccctgtgcaagtctttgtacctgaaaaaggagagatcatcagccaggtgtaactctgcgccccacgctggaaaaaactgtttcatagaggggctgggctgagacccccccacccctgagtgcctctttcagctcccccatccccatcgcaggccgatgacctggagctaagaccttttattattttttttttacacgacttttttcagaagccctgacctaaggatttatatatgtggattgtcctcaatacccctgtgatatgattatgttttatcccccagagtttggcctactggacttaaggccttgcctgtctgactgacagcctctatctccttatataagacaagtggcaggggacgagtgaagcagagtgagccaccttgggagttctccaacgctctgtgctctggttctaagaaattccctggggaactgcccctggccctcctgtcccactattgctggaggctggacatggtacatactcatgcacatgactctcccccatttcccaggtctctgggtaccccagcctgggctgggggagaatctcttcccccttttctaatgtgctctgtgatgcacacaccaagtggtaggtcaaaggtcagtatatcccggtggtgtattgtcttgctagaccctgctattttcctgaccccctaaatcctctttagggacccagtcactataccctgtctatgccctgtgggctcccagacccctgagctttgagtcagtggcatcacagtttgtagcctcagggggtctggctgggggctggtccatgcttgtggttagtggacagcagccaccctttgacagctacctctggacatctcaagggcttgcagccccactgctccttctaacattttgtttgtttttgagatggagtctcgctctgtcgcccaggctggaatgctgtagcaagatttcggctcactgcaacccccgtctcccgggttcaagcgaatctcctgcctcagccttctgagtagctgggattacaggcaagcaccaccatgcctgctaattttttatttttagtagagatggggtttcatcatgttggccaggctggtctcgaactcctgacctcaagtgatccacctgccttggcctttcaaagtgctgggattacaggcatgagccaccgcacctggcccttctaacgttttttcatcatagtcccaaaaaccaatactttacaagtggtttttgaaaggcaccacttttgtggcatgttctggttgggagagggagtcacagttcctactccccccaccagctatgcttctgctctgagaaggtggttatttatacaaacatggacatactcactcccaagggctgatgagatgctgaattttctttgggggcattcattaattgtcccagctgcagcgactggagcaagtctggaagctgcctgtgctaagaccacccagctgtccctgggttctcatcctagggccttctttgcttccaggtcaggggacctgcttcaatgagaaagcaactgaattgaggctaggagaggtagggagagctgagttctgacttcacctgtgcagaactctctgcccccatgttacctggactggaacagactgtgaatatagcagaaggttccaagaactctggtgtctgacctagaagaggcacagttctctctactggaaagaaaacgatgtagccgattgcacaagggtgccaagggaagacccaggatggcccatcaaaggaacctgggggaggatgcaggaggctgaagggatgcacctggcatttctctcactgtgctcttaccgcatcagcaacccccaacttttgggcctactctgccccccatgcgtgaataccctgcttggatgctgtgcttttccggtttgtctctaagcccctttctccagggcatgttggtttccctggcctctcagtgtcctaactggagcccagagtgccttgttctgagccaggagacggctgagcactggccctccacacctaagcgtcctttacattaacttattggtcttgtataacacctggtgccattgccaagtggctgtgtcctcagctacagagctggaattgtgtggggtttagtgctaaatacttcaataaagtctgttttttgtgattggctg

SEQ ID NO: 308 - DNA, 1410 bp, human
ggcacgaggccgagtctcaccctcccaggcagctcctacactcaactgcttctctaggaaaggtctcacctccagcctggagcagtcgggattacagaaagccccatccttggcttagggagcgccatgacgactgaaattggttggtggaagctgactttcctccggaaaaagaaatccactcccaaagtgctgtatgagatccctgacacctatgcccaaacagagggagatgcagaacccccgaggcctgacgctggaggccccaacagcgactttaacacccgcctggagaagattgtggacaagagcacaaagggcaagcacgtcaaggtctccaactcaggacgcttcaaggagaagaagaaagtgagagccacgctggcagagaaccctaacctctttgatgatcacgaggaaggacggtcatcaaagtgaagggctgaggagggtgctagcacctcttggctccctgccatcagccagatctgagacaggaccttgccacgctggcctctttggccatagctgaagctgtggggccagttgatacctgctggcaggaaatggctgttttttaggtttgtatttatgtgccgccacttttgtaaggcctgggagatcccagggtcctccaccctccccctgaccacatacaaaggcactctagttcaagagtgaaaaatctcacccaggaggaacagccctccttgaagcaatggcagggccagcagggaggtgggcatggcagggaatggagagagtgagccagacagacttcacctccttactggacacagggtcaagggcgagtttcaattgctgctccctttactttctctacctgtgactactccctggaccaatcctgaggagggcacattttccagaagccacgtgataggggctggtttctgtggagccagaggcagagacactgaacttgagctcacctcctaacaccggcagtaaacttcctggaactttgccctcaggtgcggaggggacagaggaccctggcactctgttagggtgctgtagaagactagattgatggtagtttggcctgttagttcctgttttggccatgacttttgcagatggcaagtcacacaccctcaaagggaagctacacgggccaaatcgggggagtgggtggggaattttctcctctccctttcctactataatagtatttaagacatatcagctccagagatgagtcctggagccttgaattttgtttaacaaaataattgtaggtttctctctgtaataacaacgctggaaaggccgagaacctcttttatgctcatgtcttgcatttattgagatgactgtttctcatgcctttatgttccttcatgtaagtaaagtggacctttgtgctcaaaaaaaaaaaaaaaaaaa

SEQ ID NO: 309 - DNA, 534 bp, human
ataagcttatctcagctgactcctcggagggccaagaccagcttcaagtctccatggtaccagaaaacaacaacctcacagcacctgaacctcaagaagaggtatccacaagtgaaaatccacaactctgaagagaaactaccaagactcctcctgccccaaacctcgccagagaagctcttcaaccagagggtataggtcagagggatataagagccagcatccatccctgggttctcagtaggaatgctggtgctgtctaaagacctggcattaatggaggcggaggagcagccttacgggagggatggagggaggcaggctggggagaagagaacattagactcagggaatatttaattctggttttagcattattagaataagactttatacattaactaaagtggagctttaatcactataaaaagcaaaagtatctatagacacagacacttgcctatacagagacataaccacacacactcagaggatagtgaacaaatctgtctttgacttacgacccattttgca

SEQ ID NO: 310 - DNA, 6303 bp, human
tagtaagacaggtgccttcagttcactctcagtaaggggctggttgcctgcatgagtgtgtgctctgtgtcactgtggattggagttgaaaaagcttgactggcgtcattcaggagctggatggcgtgggacatgtgcaaccaggactctgagtctgtatggagtgacatcgagtgtgctgctctggttggtgaagaccagcctctttgcccagatcttcctgaacttgatctttctgaactagatgtgaacgacttggatacagacagctttctgggtggactcaagtggtgcagtgaccaatcagaaataatatccaatcagtacaacaatgagccttcaaacatatttgagaagatagatgaagagaatgaggcaaacttgctagcagtcctcacagagacactagacagtctccctgtggatgaagacggattgccctcatttgatgcgctgacagatggagacgtgaccactgacaatgaggctagtccttcctccatgcctgacggcacccctccaccccaggaggcagaagagccgtctctacttaagaagctcttactggcaccagccaacactcagctaagttataatgaatgcagtggtctcagtacccagaaccatgcaaatcacaatcacaggatcagaacaaaccctgcaattgttaagactgagaattcatggagcaataaagcgaagagtatttgtcaacagcaaaagccacaaagacgtccctgctcggagcttctcaaatatctgaccacaaacgatgaccctcctcacaccaaacccacagagaacagaaacagcagcagagacaaatgcacctccaaaaagaagtcccacacacagtcgcagtcacaacacttacaagccaaaccaacaactttatctcttcctctgaccccagagtcaccaaatgaccccaagggttccccatttgagaacaagactattgaacgcaccttaagtgtggaactctctggaactgcaggcctaactccacccaccactcctcctcataaagccaaccaagataacccttttagggcttctccaaagctgaagtcctcttgcaagactgtggtgccaccaccatcaaagaagcccaggtacagtgagtcttctggtacacaaggcaataactccaccaagaaagggccggagcaatccgagttgtatgcacaactcagcaagtcctcagtcctcactggtggacacgaggaaaggaagaccaagcggcccagtctgcggctgtttggtgaccatgactattgccagtcaattaattccaaaacggaaatactcattaatatatcacaggagctccaagactctagacaactagaaaataaagatgtctcctctgattggcaggggcagatttgttcttccacagattcagaccagtgctacctgagagagactttggaggcaagcaagcaggtctctccttgcagcacaagaaaacagctccaagaccaggaaatccgagccgagctgaacaagcacttcggtcatcccagtcaagctgtttttgacgacgaagcagacaagaccggtgaactgagggacagtgatttcagtaatgaacaattctccaaactacctatgtttataaattcaggactagccatggatggcctgtttgatgacagcgaagatgaaagtgataaactgagctacccttgggatggcacacaatcctattcattgttcaatgtgtctccttcttgttcttcttttaactctccatgtagagattctgtgtcaccacccaaatccttattttctcaaagaccccaaaggatgcgctctcgttcaaggtccttttctcgacacaggtcgtgttcccgatcaccatattccaggtcaagatcaaggtctccaggcagtagatcctcttcaagatcctgctattactatgagtcaagccactacagacaccgcacgcaccgaaattctcccttgtatgtgagatcacgttcaagatcgccctacagccgtcggcccaggtatgacagctacgaggaatatcagcacgagaggctgaagagggaagaatatcgcagagagtatgagaagcgagagtctgagagggccaagcaaagggagaggcagaggcagaaggcaattgaagagcgccgtgtgatttatgtcggtaaaatcagacctgacacaacacggacagaactgagggaccgttttgaagtttttggtgaaattgaggagtgcacagtaaatctgcgggatgatggagacagctatggtttcattacctaccgttatacctgtgatgcttttgctgctcttgaaaatggatacactttgcgcaggtcaaacgaaactgactttgagctgtacttttgtggacgcaagcaatttttcaagtctaactatgcagacctagattcaaactcagatgactttgaccctgcttccaccaagagcaagtatgactctctggattttgatagtttactgaaagaagctcagagaagcttgcgcaggtaacatgttccctagctgaggatgacagagggatggcgaatacctcatgggacagcgcgtccttccctaaagactattgcaagtcatacttaggaatttctcctactttacactctctgtacaaaaacaaaacaaaacaacaacaatacaacaagaacaacaacaacaataacaacaatggtttacatgaacacagctgctgaagaggcaagagacagaatgatatccagtaagcacatgtttattcatgggtgtcagctttgcttttcctggagtctcttggtgatggagtgtgcgtgtgtgcatgtatgtgtgtgtgtatgtatgtgtgtggtgtgtgtgcttggtttaggggaagtatgtgtgggtacatgtgaggactgggggcacctgaccagaatgcgcaagggcaaaccatttcaaatggcagcagttccatgaagacacacttaaaacctagaacttcaaaatgttcgtattctattcaaaaggaaaaatatatatatatatatatatatataaattaaaaaggaaagaaaactaacaaccaaccaaccaaccaaccaaccacaaaccaccctaaaatgacagccgctgatgtctgggcatcagcctttgtactctgtttttttaagaaagtgcagaatcaacttgaagcaagctttctctcataacgtaatgattatatgacaatcctgaagaaaccacaggttccatagaactaatatcctgtctctctctctctctctctctctctcttttttttttctttttccttttgccatggaatctgggtgggagaggatactgcgggcaccagaatgctaaagtttcctaacattttgaagtttctgtagttcatccttaatcctgacacccatgtaaatgtccaaaatgttgatcttccactgcaaatttcaaaagccttgtcaatggtcaagcgtgcagcttgttcagcggttctttctgaggagcggacaccgggttacattactaatgagagttgggtagaactctctgagatgtgttcagatagtgtaattgctacattctctgatgtagttaagtatttacagatgttaaatggagtatttttattttatgtatatactatacaacaatgttcttttttgttacagctatgcactgtaaatgcagccttcttttcaaaactgctaaatttttcttaatcaagaatattcaaatgtaattatgaggtgaaacaattattgtacactaacatatttagaagctgaacttactgcttatatatatttgattgtaaaaacaaaaagacagtgtgtgtgtctgttgagtgcaacaagagcaaaatgatgctttccgcacatccatcccttaggtgagcttcaatctaagcatcttgtcaagaaatatcctagtcccctaaaggtattaaccacttctgcgatatttttccacattttcttgtcgcttgtttttctttgaagttttatacactggatttgttaggggaatgaaattttctcatctaaaatttttctagaagatatcatgattttatgtaaagtctctcaatgggtaaccattaagaaatgtttttattttctctatcaacagtagttttgaaactagaagtcaaaaatctttttaaaatgctgttttgttttaatttttgtgattttaatttgatacaaaatgctgaggtaataattatagtatgatttttacaataattaatgtgtgtctgaagactatctttgaagccagtatttctttcccttggcagagtatgacgatggtatttatctgtattttttacagttatgcatcctgtataaatactgatatttcattcctttgtttactaaagagacatatttatcagttgcagatagcctatttattataaattatgagatgatgaaaataataaagccagtggaaattttctacctaggatgcatgacaattgtcaggttggagtgtaagtgcttcatttgggaaattcagcttttgcagaagcagtgtttctacttgcactagcatggcctctgacgtgaccatggtgttgttcttgatgacattgcttctgctaaatttaataaaaacttcagaaaaacctccattttgatcatcaggatttcatctgagtgtggagtccctggaatggaattcagtaacatttggagtgtgtattcaagtttctaaattgagattcgattactgtttggctgacatgacttttctggaagacatgatacacctactactcaattgttcttttcctttctctcgcccaacacgatcttgtaagatggatttcacccccaggccaatgcagctaattttgatagctgcattcatttatcaccagcatattgtgttctgagtgaatccactgtttgtcctgtcggatgcttgcttgattttttggcttcttatttctaagtagatagaaagcaataaaaatactatgaaatgaaagaacttgttcacaggttctgcgttacaacagtaacacatctttaatccgcctaattcttgttgttctgtaggttaaatgcaggtattttaactgtgtgaacgccaaactaaagtttacagtctttctttctgaattttgagtatcttctgttgtagaataataataaaaagactattaagagcaataaattattttaagaaatcgagatttagtaaatcctattatgtgttcaaggaccacatgtgttctctattttgcctttaaatttttgtgaaccaattttaaatacattctcctttttgccctggattgttgacatgagtggaatacttggtttcttttcttacttatcaaaagacagcactacagatatcatattgaggattaatttatcccccctacccccagcctgacaaatattgttaccatgaagatagttttcctcaatggacttcaaattgcatctagaattagtggagcttttgtatcttctgcagacactgtgggtagcccatcaaaatgtaagctgtgctcctctcatttttatttttatttttttgggagagaatatttcaaatgaacacgtgcaccccatcatcactggaggcaaatttcagcatagatctgtaggatttttagaagaccgtgggccattgccttcatgccgtggtaagtaccacatctacaattttggtaaccgaactggtgctttagtaatgtggatttttttcttttttaaaagagatgtagcaaaataattcttccagtgcaacaaaatcaattttttgctaaacgactccaagaacaacagttgggctgtcaacattcaaagcagcagagagggaactttgcactattggggtatgatgtttgggtcagttgataaaaggaaaccttttcatgcctttagatgtgagcttccagtaggtaatgattatgtgtcctttcttgatggctgtaatgagaacttcaatcactgtagtctaagacctgatctatagatacctagaatagccatgtactataatgtgatgattctaaatttgtacctatgtgacagacattttcaataatgtgaactgctgatttgatggagctactttaagatttgtaggtgaaagtgtaatactgttggttgaactatgctgaagagggaaagtgagcgattagttgagcccttgccgggccttttttccacctgccaattctacatgtattgttgtggttttattcattgtatgaaaattcctgtgattttttttaaatgtgcagtacacatcagcctcactgagctaataaagggaaacgaatgtttcaaatct

SEQ ID NO: 311 - DNA, 1924 bp, human
cgcccgggcaggttagaattcagcgaccgcttaattctaggctcagtcccgacgtggaactcagcagcggaggctggacgcttgcatggcgcttgagagattccatcgtgcctggctcacataagcgcttcctggaagtgaagtcgtgctgtcctgaacgcgggccaggcagctgcggcctgggggttttggagtgatcacgaatgagcaaggcgtttgggctcctgaggcaaatctgtcagtccatcctggctgagtcctcgcagtccccggcagatcttgaagaaaagaaggaagaagacagcaacatgaagagagagcagcccagagagcgtcccagggcctgggactaccctcatggcctggttggtttacacaacattggacagacctgctgccttaactccttgattcaggtgttcgtaatgaatgtggacttcaccaggatattgaagaggatcacggtgcccaggggagctgacgagcagaggagaagcgtccctttccagatgcttctgctgctggagaagatgcaggacagccggcagaaagcagtgcggcccctggagctggcctactgcctgcagaagtgcaacgtgcccttgtttgtccaacatgatgctgcccaactgtacctcaaactctggaacctgattaaggaccagatcactgatgtgcacttggtggagagactgcaggccctgtatacgatccgggtgaaggactccttgatttgcgttgactgtgccatggagagtagcagaaacagcagcatgctcaccctcccactttctctttttgatgtggactcaaagcccctgaagacactggaggacgccctgcactgcttcttccagcccagggagttatcaagcaaaagcaagtgcttctgtgagaactgtgggaagaagacccgtgggaaacaggtcttgaagctgacccatttgccccagaccctgacaatccacctcatgcgattctccatcaggaattcacagacgagaaagatctgccactccctgtacttcccccagagcttggatttcagccagatccttccaatgaagcgagagtcttgtgatgctgaggagcagtctggagggcagtatgagctttttgctgtgattgcgcacgtgggaatggcagactccggtcattactgtgtctacatccggaatgctgtggatggaaaatggtcttgcttcaatgactccaatatttgcttggtgtcctgggaagacatccagtgtacctacggaaatcctaactaccactggcaggaaactgcatatcttctggtttacatgaagatggagtgctaatggaaatgcccaaaaccttcagagattgacacgctgtcattttccatttccgttcctggatctacggagtcttctaagagattttgcaatgaggagaagcattgttttcaaactatataactgaccttatttataattagggatattatcaaaatatgtaaccatgaggcccctcaggtcctgatcagtcagaatggatgctttcaccagcagacccggccatgtggctgctcggtcctgggtgctcgctgctgtgcaagacattagccctttagttatgagcctgtgggaacttcaggggttcccagtggggagagcagtggcagtgggaggcatctgggggccaaaggtcagtggcagggggtatttcagtattatacaactgctgtgaccagacttgtatactggctgaatatcagtgctgtttgtaatttttcactttgagaaccaacattaattccatatgaatcaagtgttttgtaactgctattcatttattcagcaaatatttattgagcatctcttctccataagatagtgtgataaacacggtcatgaataaagttattttccccgaaaaaaaaaaaaaaaaaaaaaaaaaa

SEQ ID NO: 312 - DNA, 3682 bp, human
acggcgcgcgcgcaccccttccgcgcagccccctgacctgcagcctccggacctcgctgcagcgcggacccggcccgcccgcccgaatgagtcagctgaggctgctgccgtcccgtcttggggtacaggctgcgaggctcctggctgcacatgacgtcccggtgtttggctggcgcagcaggtcctccgggccaccggccaccttcccaagcagcaaaggtggaggcggctccagttacatggaggagatgtacttcgcctggttggaaaacccccagagtgtccacaagtcctgggacagcttcttcagggaagccagcgaggaagccttttctggctctgctcagccacggcccccttctgttgtccatgagggcaggtctgcagtctcaagtcggaccaagaccagcaaattggtggaggaccacctggctgtacagtccctgatccgggcctaccagatccggggtcaccatgtggcccagctggaccccctgggcattctggatgcagacctggactcctttgtgccctcagacttgatcacaaccattgataaactggccttctatgaccttcaggaggctgaccttgataaggagttccagctgccgacaaccaccttcattgggggctctgaaaacaccctttctctgcgggagatcattcggcgcctggagaacacctactgccagcacattggcctggagttcatgttcatcaacgatgtggagcagtgccagtggatccggcagaagtttgagacccctggtgtgatgcagttctccagcgaggagaagcggaccctgctggcccggctagtgcgctccatgaggtttgaagacttcctggcccggaaatggtcctcagagaagcggtttggcctggagggctgtgaagtgatgattcctgccctcaagaccatcatcgacaaatccagcgagatggggattgagaatgtcatcttggggatgccacacaggggaaggctgaacgtgctggccaacgtgatccgcaaggacctggagcagatcttctgccggtttgaccccaagctggaggcggcggacgagggctccggggatgtcaagtaccacctgggcatgtaccatgagaggatcaaccgcgtcaccaaccggaacatcactctgtcgctggttgccaacccctcccacctggaggcagtggaccctgtggtgcaggggaagacaaaggcagagcagttctaccgtggagatgcccagggcaagaaggtcatgtccatcctggttcatggggacgccgcctttgctggccagggcgtggtatatgagaccttccacctgagcgacttgccctcctacacgaccaatggtaccgtgcacgtcgtcgtcaacaaccagattggattcaccacagacccccgaatggcccgctcctcaccatacccgaccgacgtggcccgggtggtcaatgcgcctatcttccatgtgaatgccgatgacccagaggctgtgatatatgtgtgcagtgtggcagccgaatggagaaacactttcaacaaagatgttgtcgtggacctggtctgttaccgccggcgtggccacaatgagatggacgagcccatgttcacccagccgctcatgtacaagcagatccacagacaggtgcctgtgctgaagaagtacgcagacaagctgattgccgagggcacagtcaccctgcaggagtttgaggaagaaattgccaaatacgaccggatctgtgaggaggcttatggcaggtccaaggataaaaagattctgcatataaagcactggttggactccccctggcctggcttcttcaacgtagatggggagcccaagagcatgacatgcccagccacggggatccctgaggacatgctcacccacatcggcagtgtggccagctctgtgcccctggaggactttaagatccacactggcctctctcgcattctgcggggccgtgcggacatgaccaagaaccggacggtggactgggcgttggcagagtacatggcctttggctccctgctgaaggaaggcatccacgtgcggctcagcgggcaggatgtggagaggggcacattcagtcaccggcaccatgttctccatgaccaggaggttgaccgcaggacgtgtgtgcctatgaatcatctctggcctgaccaggccccgtacaccgtgtgcaacagctccctctcggagtacggagtcctgggctttgagctgggctatgccatggccagccccaatgccctggtcctctgggaggcccagtttggggacttccacaacacggcccagtgcatcatcgaccagttcatcagcaccggccaggccaagtgggtgcggcataatggcattgtgctgctgctgccccatggcatggaaggcatgggcccagagcactcgtcagcgaggcccgaaaggttcctgcagatgagcaatgatgactcggatgcctaccctgcattcaccaaggacttcgaggtgagccagctctatgactgcaactggatcgtggtcaactgctccacaccggccaactacttccacgtgctgcgccggcagatcctgctgcccttccgcaagccgctgattatcttcacacctaaatctctgctgaggcacccagaggccaagtccagctttgaccaaatggtatccgggaccagcttccagcgggtgattcctgaagatggggccgcagcacgggcccctgagcaggtgcagcggctcatcttctgcacgggaaaggtgtactatgacctggtgaaggagcggagcagccaggacctggaggagaaagtggccatcacgcgcctggagcagatctctccattccccttcgacctgatcaagcaggaggcagagaagtacccaggtgcggagctggcctggtgtcaggaggagcacaagaacatgggctactatgactacatcagcccacgcttcatgaccatcctgaggcgcgcacggcccatatggtatgttggccgggacccagcggctgcaccagccacaggaaacaggaacactcacctggtgtcactgaagaagtttctggatactgccttcaatctccaggcctttgagggcaagacattttagagctgggcaaaacctgtgtaggtctcgctgtgggtttgctggggaccaagggggtgatgaaaaggggaggggcggagctcctgcccaagagaggggctgtggggccccaggataaaacagacacagtgacagggccaagagccagcactgctggccttggtgtcatgccagaatctaccaggactgagggagccagaggagtcctgtaggcaggctactgtgctggagcatcccccagctgctcccatcttgctggaatttcttgggcggcttctccacctgtatctcaagacagacacccgggggcctgtgtctgtggccgctcccatcccggcagccctggctgctgctcgccccaccctcgcttatctgtagattcaaagcgatgttctcttctgtgctcttagaagtagggagttcagcagtaacagccaggtgaagcgaacctgctgggtgatttgtttgcgctctgttttatggggcattcctgcgagatgtgtcagcttctgtatgagatgcagccacagctcatgtgtaccaaagtagaaaaccaaatcacagag

SEQ ID NO: 313 - DNA, 2500 bp, human
ctttgcagctgagactgggtggagggagaggcgcggagacactggggctctgacgagctggctgaggccctctcagtaggggggtcacgcctcctggaactcagggaccccaagtttctgtgcattcagggcggggctggccccatgccctgtgcataggggcctggctgcatcccagtcgatcagccagaggcagcagcagtggactcatcaattgtggaggaagccctggggaccctggggaccttgccgactctattcccagccagctcctaggacaagcctcagagccaacacccgctcgaccctctcccggcccctccccttctttgtcttttgcagatgatcgccgggtgtcgatccttttccctccagtcagggccaggcgtggacgccgccggaccgctgagactcggggcacggtgaagcactggccggggtctggctgggtctggcgctcgggagccagatggaggtggcgataggggccatgggagccggcgccaagtagccggtggacccccgcgctcgcacctctcccggcgcccgggcgctccccaaggctgccatggaggtgcctaacgtcaaggacttccagtggaagcgcctggcgccactgcccagccgccgggtctactgctccctgctggagaccgggggccaggtctatgccatcgggggatgtgacgacaacggcgtccccatggactgcttcgaggtctactccccggaggccgaccagtggaccgccttgccccggctgcccacagcccgggcgggggtggccgtcaccgccctggggaagcggatcatggtgattgggggcgtgggcaccaatcagctgcccctgaaggtcgtggagatgtacaacatcgatgagggcaagtggaagaagaggagcatgctgcgtgaggccgccatgggcatttctgtcacggccaaagattaccgagtatatgcggcaggcgggatgggcctggacctacgtccacacaaccacctccaacactatgacatgctgaaggacatgtgggtgtccctagcacccatgcccaccccgagatatgctgccacctccttcctccgaggctccaagatctacgtgctggggggacgacagtccaagtacgcggtcaacgccttcgaggtctttgacatcgagactcgctcctggaccaagtttcccaacattccctataagcgggccttctccagctttgtgaccctggacaaccacttgtacagcctaggaggcctgcggcaaggtcgcctctaccggcagcccaagttcctgcggacgatggacgtgttcgacatggaacaggggggatggctgaagatggaacgatcgttcttcctcaagaagcggcgggcagattttgtggctggctctctgagtggacgggtcatagtggctgggggacttgggaatcaacccactgtcctggagacggcggaagcattccacccagggaagaacaaatgggagatcctccctgccatgcccacaccccgctgtgcctgctccagcatagtcgtcaagaactgcctcctcgccgtgggaggtgtcaaccagggtctgagtgacgcagtggaggccctgtgtgtctctgactcctagctgtctctgggctcagtacctttgccctggaccatatcacttcactcttaacatgaggaatgatcttgtccaagcagtcggggctacttccaagaatgtcagctcctgttagcaaccagtggagtctggccttggggctctaagttgacctctctatagctccaaatcctaccaatctcagaaaactgtaagaggcacagatgactccaccagctgcagagctgactctgaagagagtcttcacttactgcacaggcaaagaaaggcacaggaatatttcctacctctccctcctgtgagtcccacctccccccacccccatctccaggaggcaggtagagcagttctgaccgagaggatagactgctgttgctgtctttccccagctctgaactagttttaaggtagcttaggatgaaaaatggagaatgattgggggttccaaaccactttcttctcccttggcttatatctcttcaccatttggtggtcaactgtgggcctaccctggacctcatctactcagcgagaattggacatgaagctagaggcagctgccttggaagggaagtcaggctcacttggacagcccaggccatggcaggaagaatcccttcctcttggggtccttgatgggcatgtgtgatggggaaggagcagtctcccagccctgggtctgctccccacatctctcctaattccacttcaccttttgccaccccctccccaccagaggcctagcccttttgtcaccgaaggcccccagagtgtttctgtgtgaaaccctctcatttacactgtggcatcaaaatccacaaaagatggattaattgcactctggttaatagcagcagcacaatgattaaaatctatattcct

SEQ ID NO: 314 - DNA, 3636 bp, human
tgagtcccggccggagccccacggccgcgggcggcgcctaggacggcgatccgcgccctggaggatccgccggccgcccggctccactacagctccagccgcctgcagcggggccctcctgaggccccagaggaagagaccatgaaagtgaggtcggccggcggcgatggagatgccttgtgcgttacagaagaggacctggcgggtgacgacgaggacatgccgaccttcccatgcacccagaagggccggccagggccccgctgcagccgctgccagaagaacctatctttgcacacatcggtgcggattctttacctcttcctggccctgctcctggtggccgtggctgtgttggcctctctggttttcagaaaagtggactctctctccgaagacatctccttgacccagtctatttatgacaagaagcttgtgttaatgcagaaaaatctccagggcctggatccgaaagccctgaacaactgctctttctgccatgaagctgggcagctggggccagagatccgaaaactgcaggaggagctggagggaattcagaagctgcttctggcccaggaggtgcagctggaccagaccttacaggcccaggaggtgctctccaccaccagcagacaaatctcccaggagatgggcagttgctccttctccatccaccaggttaaccagtctctggggctcttcctggcccaggtgagaggctggcaggccaccacagctggcctggacctctctctgaaggacctcacccaggagtgctacgatgtcaaggctgcagtgcaccagatcaacttcaccgtggggcagacttccgagtggatccacgggatccagcggaagacagacgaggagaccctgaccctccagaagattgtcaccgactggcagaactacacacggctcttcagcggcctgcgcaccacctccaccaagactggagaggcggtcaagaacatccaggccaccctgggggcctcctcacagcgcatcagccagaactcagagagcatgcacgacctggtactccaggtcatgggcttgcagctgcagctggataacatctcgtccttcctggatgaccacgaagagaacatgcatgatcttcagtaccatacccactacgcccagaaccgcactgtggagaggtttgagtctctggaaggacgcatggcttctcacgagattgaaattggcaccatcttcaccaacatcaatgccaccgacaaccacgtgcacagcatgctcaagtacctggatgacgtgcggctctcctgcacgctgggcttccacacccatgccgaggagctctactacctgaacaagtctgtctccatcatgctgggcaccacagacctgctccgggagcgcttcagcctgctcagtgcccggctggacctcaacgtccggaacctctccatgatcgtggaggagatgaaggcagtggacacacagcatggagaaatccttcgcaatgtcaccatcctacgaggtgcccccggccctccaggaccaagaggattcaaaggagatatgggcgtgaaagggcctgttggcggcagaggcccgaaaggagaccccggcatcttgggccccctgggaccccagggtcctcaggggcaacctggagaggccgggcctgtgggagaaaggggccctgttggccctcgagggttcccaggcctcaaaggctcaaagggcagctttggaactggagggccgagaggacagccaggcccaaaaggggacatagggcccccagggccagaagggcccccggggtctccagggccctcagggcctcagggaaaaccgggaattgcagggaagacagggtcaccaggccagcggggggccatggggcctaagggtgaaccagggatccagggtccccctggtctcccggggcctccaggtccaccaggaagccagagcttctactgaggagggctgtggcagagccactgtcacacagaatgccggaggggcgcagagcagatccaggccccagaaagcctcacctacagacagctgtggtcctctgattccaatgagggggctccccagggctgaccctgcagctttgggctcccccatagtgactgtgccataggaaagcagcccctcctcacacatacatgtgcacatgcacacacatgcatgcacacacatgcacacatacacgcacatgcacacatacacatgcatgcacacatacacaggcatacatgcatgcacacatacatatgcacgcacacacacatgcacacatacacgtgcacacatacacaggcacacatgcatgcacacatacacatgcacacacacatgcacacatatatgcacaggcacacacatgtatgcacacacacatgcaccgcacacatatccatgcacacaaacacatatatacacatgcacatacacagatttttctgctggccaggtgggccaactgggtttcccctggctgggcaggaggagagggcagaggaagaccccctctcctgtgactgagcctgccagggaggcagctacctcgggaggaaggtctcacatctgtctttgggcacccatgctggccagcagtttcccagggctccctggggttgaaaagccccaaggaaacctttgcgggtggggcgttactgccaaaactccagaggcaaagtggacctggcaaccacaagaccctccccataagcaggggaccagcagacccgggagctgtcccctgtctgtcacagcacagtggggccacgaggctgacattctctggccttgcacacagtgccccctgagaagttcaacatttatttcttcacgtgtccaggaaaattcctcaattcatccttgcctctgcccttcaggagcagcctggaaggaatccaagcaggagtttcatctgcatgggggcactttgcaggccctggaacattgggcctgagtggagatgggagacagaggcaggccagaaggttctctctgcacagctgcctcccttgctctccctgagggtggcctgccccattccccaagggggctcctttggagtggtagggaggatcaggctgcagaagggccaaccccttgcaacagggcagctctcgcctcccgcacacggctctcctgatcacagctgcatgccgaccttgtcccaccgggacccacaatggcccgagccctctttgcatgggcagccagctggactaggagtgggaagggcctggacactcacagaggccccctctgtcatcactccttggcacccaccaacttcctgcacacactggcagagaggggcgctgggaaatcaccccacagggtggaggtctcctgttggctacactctaaagctgctttgccttcatgttcaaacagattcaggcaccaccccctccaccgcccgcaaggttagggcatagatttgtctccttcccaacacggacccagagagcagcccttccctgctcaaagcctttccgcaccctcctgactgtcctggatgtgcaactggtttgcactgcacaccccacggccatgtaactctcctgtccacatatgataataccattctgcatagtattactgactcagtaaagaactatttccaggagt

SEQ ID NO: 315 - DNA, 987 bp, human
aaggccctgccagcttgggagggaattgtccctgcctgcttctggagaaagaagatattgacaccatctacgggcaccatggaactgcttcaagtgaccattctttttcttctgcccagtatttgcagcagtaacagcacaggtgttttagaggcagctaataattcacttgttgttactacaacaaaaccatctataacaacaccaaacacagaatcattacagaaaaatgttgtcacaccaacaactggaacaactcctaaaggaacaatcaccaatgaattacttaaaatgtctctgatgtcaacagctacttttttaacaagtaaagatgaaggattgaaagccacaaccactgatgtcaggaagaatgactccatcatttcaaacgtaacagtaacaagtgttacacttcccaatgctgtttcaacattacaaagttccaaacccaagactgaaactcagagttcaattaaaacaacagaaataccaggtagtgttctacaaccagatgcatcaccttctaaaactggtacattaacctcaataccagttacaattccagaaaacacctcacagtctcaagtaatagacactgagggtggaaaaaatgcaagcacttcagcaaccagccggtcttattccagtattattttgccggtggttattgctttgattgtaataacactttcagtatttgttctggtgggtttgtaccgaatgtgctggaaggcagatccgggcacaccagaaaatggaaatgatcaacctcagtctgataaagagagcgtgaagcttcttaccgttaagacaatttctcatgagtctggtgagcactctgcacaaggaaaaaccaagaactgacagcttgaggaattctctccacacctaggcaataattacgcttaatcttcagcttctatgcaccaagcgtggaaaaggagaaagtcctgcagaatcaatcccgacttccatacctgctgctgg

SEQ ID NO: 316 - DNA, 2338 bp, human
gtctgacatagcaacttggactgaaacttcgtttttgttgaaggccaaacatataagctgagaattaggcttaaaaaatgcctggtttaacctcacttggctatttactgattacatcatctgcatttatagcttaatcatctgttaaattggggttctccacgcacacaggatcatgtggttgtgtttgtatatattaggagatatctataacctgaacatatacatagagagatgggttatgctccctggttaactaaaacgtggaaactttctaaagatgtgagagagctcttaaggcaattataaatagtcttttaaggaagattcatattgtatgttctgttgttgcaggccaagtggcatcagagctgagtgatggacgacctgcagtcccagaacctctccatggacatgactgactcccctcctgccttggctaataacagactggagaatggcatggctcagctgatcaccaccgaggcctggaacatcaactccactgacctggtaaagaaggccctggtgaccgtgccagccccatccattctgaacccccctgccgagtctcagagtggcatggctctgaaggtggcggccactgtgttgcagcccctgtgcctcggggagagcccagtggtgatgcccattcacatgcaggtggagggaagctccgcaccagagctcaatccgaatggcaatgccacctacgtcatgaccacccagggccccgtgcaactgcccgtggtgctggagcagcacgtctttcagcacctcaactcccctctggtcctgccgcaggaggccccatgctcctccagtaccatccacaacaacctcttccagggagcggaggaccccgaggcccagccccagctcctggacctgaggatccccagccagccgcaggagcccactttgccatttgaagctgtgctccagaatttgtttccctcccagggcactctcgggcccccaccctgtcagcctcctcctggctatgcccctgtgcccccacagccttttagctcccccttgtcccccctggtcccaccagccaccctcttggtgccgtatcctgtaatcgtccccttgcctgtgccagtccctattcccatccccatcccggtgcctcagagttctgaatccaagttcagctccagtttccccaagccaccatcttccttcggcctgcacccctttaaaggcacccagacccctctggaaaaagatgaactgaagccctttgacatcctccagcctaaggagtacttccagctcagccgccacacggtcattaagatgggaagtgagaacgaggccctggatctctccatgaagtcagtgccctggctcaaggctggtgaagtcagtcccccaatcttccaggaagatgcagccctagacctgtcagtggcagcccaccggaaatccgagcctccccctgagacactgtatgacagtggtgcatcagtggacagctcaggtcacacagtgatggagaaacttcccagtggcatggaaatttcttttgcccctgccacgtcccatgaggccccagccatgatggatagtcacatcagcagcagtgatgctgctaccgagatgctcagccagcccaaccaccccagcggcgaagtcaaggctgaaaataacattgagatggtgggcgagtcccaggcggccaaggtcattgtctctgtcgaagatgctgtgcctaccatattctgtggcaagatcaaaggcctctcaggggtgtccaccaaaaacttctccttcaaaagagaagactccgtgcttcagggctatgacatcaacagccaaggggaagagtccatgggaaatgcagagccccttaggaaacccatcaaaaaccggagcataaagttaaagaaagtgaactcccaggaaatacacatgctcccaatcaaaaaacaacggctggccaccttttttccaagaaagtaaataacggctttttaaaatttgtatgattataatatggggaaaggtgcattggttttataaaaaggcatttaaaacaaattatctttgttaattattttggggagtagttgggaaatggaaaggtgaattggctctagaggccctgtatgctagtatcattttcttttttaatttttgacttttcacaaatgagtaaataagagcaacctatttttcaagcagattgcacattttttgcagctttaatggaatattgggtgaattagaggggtaaaaaaagctattttcattgccacaaagtgctttgatgatgtaatacctaataaagggtaggatgaatatttcacaataaatgtttgtttgcact

SEQ ID NO: 317 - DNA, 1749 bp, human
gatttgctctgccagcagctgtcggtgccgcgctcgacaccgagtcctagctaggcgctcacagaatacgcgctccctccctcccccttctctgtcccccgcctctcgctcaccccggcccactccagcggcgactttgagggattccctctctggcggcctctgcagcagcacagccggcctcattcggggcactgcgagtatggatctccaaggaagaggggtccccagcatcgacagacttcgagttctcctgatgttgttccatacaatggctcaaatcatggcagaacaagaagtggaaaatctctcaggcctttccactaaccctgaaaaagatatatttgtggtgcgggaaaatgggacgacgtgtctcatggcagagtttgcagccaaatttattgtaccttatgatgtgtgggccagcaactacgtagatctgatcacagaacaggccgatatcgcattgacccggggagctgaggtgaagggccgctgtggccacagccagtcggagctgcaagtgttctgggtggatcgcgcatatgcactcaaaatgctctttgtaaaggaaagccacaacatgtccaagggacctgaggcgacttggaggctgagcaaagtgcagtttgtctacgactcctcggagaaaacccacttcaaagacgcagtcagtgctgggaagcacacagccaactcgcaccacctctctgccttggtcacccccgctgggaagtcctatgagtgtcaagctcaacaaaccatttcactggcctctagtgatccgcagaagacggtcaccatgatcctgtctgcggtccacatccaaccttttgacattatctcagattttgtcttcagtgaagagcataaatgcccagtggatgagcgggagcaactggaagaaaccttgcccctgattttggggctcatcttgggcctcgtcatcatggtaacactcgcgatttaccacgtccaccacaaaatgactgccaaccaggtgcagatccctcgggacagatcccagtataagcacatgggctagaggccgttaggcaggcaccccctattcctgctcccccaactggatcaggtagaacaacaaaagcacttttccatcttgtacacgagatacaccaacatagctacaatcaaacaggcctgggtatctgaggcttgcttggcttgtgtccatgcttaaacccacggaagggggagactctttcggatttgtagggtgaaatggcaattattctctccatgctggggaggaggggaggagggtctcagacagctttcgtgctcatggtggcttggctttgactctccaaagagcaataaatgccacttggagctgtatctggccccaaagtttagggattgaaaacatgcttctttgaggaggaaacccctttaggttcagaagaatatggggtgctttgctcccttggacacagctggcttatcctatacagttgtcaatgcacacagaatacaacctcatgctccctgcagcaagacccctgaaagtgattcatgcttctggctggcattctgcatgtttagtgattgtcttgggaatgtttcactgctacccgcatccagcgactgcagcaccagaaaacgactaatgtaactatgcagagttgtttggacttcttcctgtgccaggtccaagtcgggggacctgaagaatcaatctgtgtgagtctgtttttcaaaatgaaataaaacacactattctctggc

SEQ ID NO: 318 - DNA, 2026 bp, human
ggcacgagggagacatggccagacatgactcctgcttccccttaggaagtaaatcttacttatggttgtgaactgcttggagtccaggatgcccagatgtgaggggcagatgaagggaatgttgctggaaaggtgccttttaaggctgctgagaatttctggactgtgtcctgatggacgcagcaccatcaaagcccagaatttctgaaaacggtgacaaggttaacataaggacaacaaatactccaccctgtcatggtatgtgaggtgtgggtgtggcggtttctgtgtacgtttgctcatacacgcacatccaaaagcctgtgcctcattcctggccatgggtgaggacttggtctgtcacggctgatgaggactcccacaaccggccaagttatgtcttattatacacccccagaaagagagaaagctgccttctggaggactgattccacatgctatattcagctgagttgatttctgtgtctatttcaacccataacctgaagaatgatcaccttattccttattcattaattttcttgattaatagggaaacttgggaatagctataaagtaaaacttgggtggaacctggggccctggcatcacacaagtgtgattaggatggtcaaggtcatcaggagtacagcctattatattcccacatcctgagaaaggtcatttctcccacacacgacaaagtcacagacatcctgcacctgccactaggcatcctcatcctactgacatgcccatttctccagttttcttaatctgagactcccttcccttgttttttaaagataccgtgcttctccacatcctcatccttcaaggagcatattttgctcttaggatggtctttgggattcaagaatagaataataaatccaaacttggtcattcccattttgaagagatgcaagagggcccagtgaggacatccgcctccctgaaagtggtgctagacagagctgaggtcattgtatctgtgtatccacataggatttctcttaattcagcttgaattgatggggagggaggtaagagtagggtcagagttactcatcccttttcaaagaattgtgggtggaagtttgtaaaggccattcatttgattttcaaaatcaaagcgacagctctacttccacttggccttagatctctgctataccctgccatagccttgatgccactgggcacaagccacctgccaaatacaggagtggcctctcccagcctggcatgataggggggtctgtgccctcagatgtgttgacagctgctcttctgaattgccacacctgtgctacacttggaattctgtgctctgactctgcagggtaggaccacgtgccatctcacacagaggtcaaccgatgagcccactcactcgtacatgccttcttccacagtgggaagcatgatctggcaggggccgccctgtaggctggggatgggctgctgtgtgaatgttgacgttcgtttcatggagaaaggggaggtgaaagattgaagagcaggttcctgtcaatgttctgagttcgagctggaggtgtagattgaatagtctacatggtctgtgagtgtgtgagatgaacccttccatcctttgacacctggttgtatgtgtaggctaagaaggaaggaccctcctgtcagtgtgcaaagctgtaatctcatggactagaagagagggggccaaggggatggacaggagaagtcatgcagaatctaagcaggaatgcagatagaacacatctaggctcttttccccaggagagtgatgatggagcatatagatctggctcaaattcagcctccatcacttaccagtcaggaaccctggcgatatcactttaactttctgaacctcagagtcttcacctataagacggggaaaataataccaccctttcaagattgttgagataaataagtgatataaaacatgtaaagcttagttctggccacagtgtagctactcaataaatgataatactaaaaaaaaaaaaaaaaaaaa

SEQ ID NO: 319 - DNA, 3279 bp, human
actgccggcctgcgcggtactcactgccggcctccgcggtacccactgccggcctccgcgctacccggccgcagcgcgcgagtcacatggaagctcctgaggagcccgcgccagtgcgcggaggcccggaggccacccttgaggtccgtgggtcgcgctgcttgcggctgtccgccttccgagaagagctgcgggcgctcttggtcctggctggccccgcgttcttggttcagctgatggtgttcctgatcagcttcataagctccgtgttctgtggccacctgggcaagctggagctggatgcagtcacgctggcaatcgcggttatcaatgtcactggtgtctcagtgggattcggcttatcttctgcctgtgacaccctcatctcccagacgtacgggagccagaacctgaagcacgtgggcgtgatcctgcagcggagtgcgctcgtcctgctcctctgctgcttcccctgctgggcgctctttctcaacacccagcacatcctgctgctcttcaggcaggacccagatgtgtccaggcttacccagacctatgtcacgatcttcattccagctcttcctgcaacctttctttatatgttacaagttaaatatttgctcaaccagggaattgtactgccccagatcgtaactggagttgcagccaaccttgtcaatgccctcgccaactatctgtttctccatcaactgcatcttggggtgataggctctgcactggcaaacttgatttcccagtacaccctggctctactcctctttctctacatcctcgggaaaaaactgcatcaagctacatggggaggctggtccctcgagtgcctgcaggactgggcctccttcctccgcctggccatccccagcatgctcatgctgtgcatggagtggtgggcctatgaggtcgggagcttcctcagtggcatcctcggcatggtggagctgggcgctcagtccatcgtgtatgaactggccatcattgtgtacatggtccttgcaggcttcagtgtggctgccagtgtccgggtaggaaacgctctgggtgctggagacatggagcaggcacggaagtcctctaccgtttccctgctgattacagtgctctttgctgtagccttcagtgtcctgctgttaagctgtaaggatcacgtggggtacatttttactaccgaccgagacatcattaatctggtggctcaggtggttccaatttatgctgtttcccacctctttgaagctcttgcttgcacgagtggtggtgttctgagggggagtggaaatcagaaggttggagccattgtgaataccattgggtactatgtggttggcctccccatcgggatcgcgctgatgtttgcaaccacacttggagtgatgggtctgtggtcagggatcatcatctgtacagtctttcaagctgtgtgttttctaggctttattattcagctaaattggaaaaaagcctgtcagcaggctcaggtacacgccaatttgaaagtaaacaacgtgcctcggagtgggaattctgctctccctcaggatccgcttcacccagggtgccctgaaaaccttgaaggaattttaacgaacgatgttggaaagacaggcgagcctcagtcagatcagcagatgcgccaagaagaacctttgccggaacatccacaggacggcgctaaattgtccaggaaacagctggtgctgcggcgagggcttctgctcctgggggtcttcttaatcttgctggtggggattttagtgagattctatgtcagaattcagtgacgtggtaggaaagaaagtcaggtcgagtgatgcttttgagcttacacacaattcacaggcccaccagtgacaatttactgtgagttaatgtcattcaggtgtgcccatggattttgagggctggaaatgcaaagacacatttttctataaaaagaaaaagcaactaaggttaaaagctatattgtggcccaagacactgtctgaaagatgacatgagtagtaattcaccactatctgaaccaagcaaggatcaatgtgctgactgcattggccaatggctttgatacttctgctatttttttagacacaaacccataaactaactgcttaagaattcatactgcttgaattatgtaaaatatattttacagtatatctttccttgggccttagattactattcactgggcaaatggtatttgtttttgttttaattttttttttaatagacggaagtcttgctctgtcatgcaggctggagtgcggtggtgcgatcatagctcactgcagcctcgaactcttgggcttcaagcaatcctcctgtgtcagccaccagagtagctgagactacaggggtatgccaccatgcccagctggcatttgttaatcttcatttgaggtctagatctaggcactgtggacactgaaaaacagttgggaaatctttcgagctgtggaaatccaaacaaagactgataattcctggtaggggtgtgtgcgtgacgtactgcagcctcaacctcctgggctcaagtgatcctcccacctcagcctcctgagtagctgagaccacaggcgtgtgccaccacgcctagctaattttttataccagggtctaccctttgtttcccaggctggtcttgaattcctgggatcaagcaatccttccaccttgccctcccaaagtgttgggattataggcatgagccaccacgactggccagaggacaaaattttaataaaggtcttagcttaagcagtaatcctacttcattaagccttcctggggtgcggtacacaccgttaattcagcaaccctcagtacatactaagtatgctcagtgctgtgaaagtggattacaccaaattaagtcattcttatcacacccaatcaaaagtcaagaagccagggataaaagcacctcaggcacataacattaatctagtaatgtaattctctgcacatccagctggtgaaactgcgtgctgtaagctgggaccagctttgtccataactgctgagagaacttgctgaagctctaggaataattttgcctgcccggttgctcaccagttgtagcttgccagctcccaacacccttcctggtgccaataaactttctcaaagagcaatactgacatttcttttgataaaacctccagccttctctgtgttgttccgacataccgaggaccaactggtctacatggatgccctgaacatgcaattctttcttccaaaataaaacattaaatagag

SEQ ID NO: 320 - DNA, 853 bp, human
aaaacttctccccactcttgatcagaatttccaggtggcctacccagactactgcccgctcctgatcatgacagatgcctccctggtagatttgaataccaggatggagaagaaaatgaaaatggagaatttcaggccaaatattgtggtgaccggctgtgatgcttttgaggaggatacctgggatgaactcctaattggtagtgtagaagtgaaaaaggtaatggcatgccccaggtgtattttgacaacggtggacccagacactggagtcatagacaggaaacagccactggacaccctgaagagctaccgcctgtgtgatccttctgagagggaattgtacaagttgtctccactttttgggatctattattcagtggaaaaaattggaagcctgagagttggtgaccctgtgtatcggatggtgtagtgatgagtgatggatccactagggtgatatggcttcagcaaccaggagggattgactgagatcttaacaacagcagcaacgatacatcagcaaatccttattatccagccttcaactatctttaccctggaaaacaatctcgatttttgacttttcaaagttgtgtatgctccaggttaatgcaaggaaagtattagaggggggaatatgaaagtatatatataaattttaggtactgaaggctttaaaaataattaagatcatcaaaaatgctattttgaatgttatcatggctattacacttttacttcctgactttaatattgatgaataaagcaagtttaatgaatcaactaaaaaaaaaaaaaaaaaaaaaaacaaacaaaaaaaaaaaaaaaaaaaaaaaaaaaaaaaaaaaaa

SEQ ID NO: 321 - DNA, 914 bp, human
ggcggcgagcggaatgcagcggcccgaggcctggccacgtccgcacccgggggagggggccgcggcggcccaggccgggggcccggcgccgcctgctcgagccggggagccctcggggctgcggttgcaggaaccttccctctacaccatcaaggctgttttcatcctagataatgacgggcgccggctgctggccaagtattatgatgacacattcccctccatgaaggagcagatggttttcgagaaaaatgtcttcaacaagaccagccggactgagagtgagattgcattttttgggggtatgaccatcgtctacaagaacagcattgacctcttcctatacgtggtgggctcatcctacgagaatgagctgatgctcatgtctgttctcacctgcctgtttgagtctctgaaccacatgttaaggaagaacgtggagaagcgctggttgctggagaacatggacggagccttcttggtgctggacgagattgtggatggcggtgtgattctggagagtgacccccagcaagtgatccagaaggtgaattttagggcagatgatggcggcttgactgaacagagtgtggcccaggttcttcagtctgccaaggaacaaattaaatggtcgttattgaaatgaaggctgtggattcaaggctccctgccccccagaccatttccccaatcctggcaaaagcccaaagatcccagggtcaggagagacccctctgtatccccaggtccctcccagaactgactcctaaggtctccagccagggcttctgagatgcaaaggtttggcctcaggagagtcaccttttctcacggccctggccttaactcatatcttaggcattcctggccccagggccctaataaacctgcttttgtcttctgcaaaaaaaaaa

SEQ ID NO: 322 - DNA, 2043 bp, human
gcacgagccggagtggacaggtgaggaggggaggacttgcctcgccgaggccgctgcgaggagcgtgcccaagggcgaaggtccagggaacccggctcccgcgcaccgaagacggccgccatgccggcccgttgtgtggccgcccactgcggcaacaccaccaagtctgggaagtcgctgttccgctttcccaaggaccgggccgtgcggctgctctgggaccgcttcgtgcggggttgccgcgccgactggtacggaggcaatgaccgctcggtcatctgctctgaccactttgccccagcctgttttgacgtctcttcggttatccagaagaacctgcgcttctcccagcgcctgaggctggtggcaggcgccgtgcccaccctgcaccgggtgcccgccccggcacctaagaggggagaggagggagaccaagcaggccgcctggacacgcgaggagagctccaggcagccaggcattctgaggctgccccaggtccagtctcctgtacacgcccccgagctgggaagcaggctgcagcttcacagattacgtgtgaaaatgaacttgtgcaaacccaaccccatgctgataatccatctaatactgtcacttcagtacctactcactgtgaagaaggcccagtgcataaaagtacacaaatttctttgaaaaggccccgtcaccgtagtgtgggtattcaagccaaagtgaaagcgtttggaaaaagactgtgtaatgcaactactcagacagaggaattgtggtctagaacttcctctctctttgacatttactccagtgattcagaaacagatacagactgggatatcaagagtgaacagagtgatttgtcttatatggctgtacaggtgaaagaagaaacatgttaaaaactcaacatcaaatgctctgatgtgctatagattttcaaatctttactcacataattatctctttgctattgtaaatctttcacttcaagataatttgacagttgagtatcagcataatttgtttagctctaaggcaaaagtttgcttgcttgccaacacaatgaagataatacctacccacaaacatccctattctctactttcacctttttttttcttttaatccttttggtagaaatcaggttacaaagcaaaaccacaatatcagcaacacttcctaatcaaaattaagcattgaatatttgtttaagcttagttcagaagcaacgctcctacaggacttgacatttgctagttagaatatccctactcttctaaataatttgaaagtatagagcagtaacacagtaacagtgagcacagccaagcctgacactactaaatgatttggtagtgaagccaggacatctacccttgactattttttatgttatttatttattagtttgtccatttgtaacatgtatagatctgtcctgtgagcatttctgatgaatctatggttcttacagaaatttttcaaaggaatcaatttagagatagagttttcatatacttacattaacttattaatgaaatctgtttgcatcagtgcttactgcgacacattaattagcttgattaatttagattagaatcattaacatcatgaaaaataaaagtactacatttctaacgtattcccattgcaggtgttaggtattttttctgtcaacacctctcttttgaattctacatttgagaaataagcatggaaatattagctgccccgtctgccattcaccaggaaaaatttctatggcaattttgtaccatgaagtaaactgttacaatagtttctgagaagcatactataactctgatcttccattgagaataacaaaaataaatatcaattttacacctcatatgtcttcttagttctgaatgattagaagaacttgcatgtatttttatcctagaaggtttaaataatacatcaaagttattttcttccaaatgtaattttatgtctgctttaaggaaaataaaataaaatattaatagggaaaaaaaaaaaaaaaaaaaaaaaaaaaaaaaaaaaaa

SEQ ID NO: 323 - DNA, 5494 bp, human
gcagagctgcagaggcaccggacgagagagggctccgcgggcccagctggcagccaggccggagacaagttgcagtcccgggctctggtgacgccgtggccgcagggtctccattttgggacattctaatccctgagcccctattattttcatcatgggcttctgcctggctctagcatggacacttctggttggggcatggacccctctgggagctcagaaccccatttcgtgggaggtgcagcgatttgatgggtggtacaacaacctcatggagcacagatggggcagcaaaggctcccggctgcagcgcctggtcccagccagctatgcagatggcgtgtaccagcccttgggagaaccccacctgcccaacccccgagaccttagcaacaccatctcaaggggccctgcagggctggcctccctgagaaaccgcacagtgttgggggtcttctttggctatcacgtgctttcagacctggtgagcgtggaaactcccggctgccccgccgagttcctcaacattcgcatcccgcccggagaccccatgttcgaccccgaccagcgcggggacgtggtgctgcccttccagagaagccgctgggaccccgagaccggacggagtcccagcaatccccgggacccggccaaccaggtgacgggctggctggacggcagcgccatctatggttcctcgcattcctggagcgacgcgctgcggagcttctccaggggacagctggcgtcggggcccgaccccgcttttccccgagactcgcagaaccccctgctcatgtgggcggcgcccgaccccgccaccgggcagaacgggccccgggggctgtacgccttcggggcagagagagggaaccgggaacccttcctgcaggcgctgggcctgctctggttccgctaccacaacctgtgggcgcagaggctggcccgccagcacccagactgggaggacgaggagctgttccagcacgcacgcaagagggtcatcgccacctaccagaacatcgctgtgtatgagtggctgcccagcttcctgcagaaaacactcccggagtatacaggataccggccatttctggaccccagcatctcctcagagttcgtggcggcctctgagcagttcctgtccaccatggtgccccctggcgtctacatgagaaatgccagctgccacttccagggggtcatcaatcggaactcaagtgtctccagagctctccgggtctgcaacagctactggagccgtgagcacccaagcctacaaagtgctgaagatgtggatgcactgctgctgggcatggcctcccagatcgcagagcgagaggaccatgtgttggttgaagatgtgcgggatttctggcctgggccactgaagttttcccgcacagaccacctggccagctgcctgcagcggggccgggatctgggcctgccctcttacaccaaggccagggcagcactgggcttgtctcccattacccgctggcaggacatcaaccctgcactctcccggagcaatgacactgtactggaggccacagctgccctgtacaaccaggacttatcctggctagagctgctccctgggggactcctggagagccaccgggaccctggacctctgttcagcaccatcgtccttgaacaatttgtgcggctacgggatggtgaccgctactggtttgagaacaccaggaatgggctgttctccaagaaggagattgaagaaatccgaaataccaccctgcaggacgtgctggtcgctgttatcaacattgaccccagtgctctgcagcccaatgtctttgtctggcataaaggagacccctgtccgcagccgagacagctcagcactgaaggcctgccagcgtgtgctccctctgttgttcgtgactattttgagggcagtggatttggcttcggggtcaccatcgggaccctctgttgcttccctttggtgagcctgctcagtgcctggattgttgcccggctccggatgagaaatttcaagaggctccagggccaggaccgccagagcatcgtgtctgagaagctcgtgggaggcatggaagctttggaatggcaaggccacaaggagccctgccggcccgtgcttgtgtacctgcagcccgggcagatccgtgtggtagatggcaggctcaccgtgctccgcaccatccagctgcagcctccacagaaggtcaacttcgtcctgtccagcaaccgtggacgccgcactctgctgctcaagatccccaaggagtatgacctggtgctgctgtttaacttggaggaagagcggcaggcgctggtggaaaatctccggggagctctgaaggagagcgggttgagcatccaggagtgggagctgcgggagcaggagctgatgagagcagctgtgacacgggagcagcggaggcacctcctggagacctttttcaggcaccttttctcccaggtgctggacatcaaccaggccgacgcagggaccctgcccctggactcctcccagaaggtgcgggaggccctgacctgtgagctgagcagggccgagtttgccgagtccctgggcctcaagccccaggacatgtttgtggagtccatgttctctctggctgacaaggatggcaatggctacctgtccttccgagagttcctggacatcctggtggtcttcatgaaaggctctcctgaggaaaagtctcgccttatgttccgcatgtacgactttgatgggaatggcctcatttccaaggatgagttcatcaggatgctgagatccttcatcgagatctccaacaactgcctgtccaaggcccagctggctgaggtggtggagtccatgttccgggagtcgggattccaggacaaggaggaactgacatgggaagattttcacttcatgctgcgggaccacaatagcgagctccgcttcacgcagctctgtgtcaaaggggtggaggtgcctgaagtcatcaaggacctctgccggcgagcctcctacatcagccaggatatgatctgtccctctcccagagtgagtgcccgctgttcccgcagcgacattgagactgagttgacacctcagagactgcagtgccccatggacacagaccctccccaggagattcggcggaggtttggcaagaaggtaacgtcattccagcccttgctgttcactgaggcgcaccgagagaagttccaacgcagctgtctccaccagacggtgcaacagttcaagcgcttcattgagaactaccggcgccacatcggctgcgtggccgtgttctacgccatcgctggggggcttttcctggagagggcctactactacgcctttgccgcacatcacacgggcatcacggacaccacccgcgtgggaatcatcctgtcgcggggcacagcagccagcatctctttcatgttctcctacatcttgctcaccatgtgccgcaacctcatcaccttcctgcgagaaaccttcctcaaccgctacgtgcccttcgacgccgccgtggacttccatcgcctcattgcctccaccgccatcgtcctcacagtcttacacagtgtgggccatgtggtgaatgtgtacctgttctccatcagccccctcagcgtcctctcttgcctctttcctggcctcttccatgatgatgggtctgagttcccccagaagtattactggtggttcttccagaccgtaccaggcctcacgggggttgtgctgctcctgatcctggccatcatgtatgtctttgcctcccaccacttccgccgccgcagtttccggggcttctggctgacccaccacctctacatcctgctctatgtcctgctcatcatccatggtagctttgccctgatccagctgccccgtttccacatcttcttcctggtcccagcaatcatctatgggggcgacaagctggtgagcctgagccggaagaaggtggagatcagcgtggtgaaggcggagctgctgccctcaggagtgacccacctgcggttccagcggccccagggctttgagtacaagtcagggcagtgggtgcggatcgcttgcctggctctggggaccaccgagtaccaccccttcacactgacctctgcgccccatgaggacacgcttagcctgcacatccgggcagcagggccctggaccactcgcctcagggagatctactcagccccgacgggtgacagatgtgccagatacccaaagctgtaccttgatggaccatttggagagggccaccaggagtggcataagtttgaggtgtcagtgttagtgggagggggcattggggtcaccccttttgcctccatcctcaaagacctggtcttcaagtcatccgtcagctgccaagtgttctgtaagaagatctacttcatctgggtgacgcggacccagcgtcagtttgagtggctggctgacatcatccgagaggtggaggagaatgaccaccaggacctggtgtctgtgcacatctacatcacccagctggctgagaagttcgacctcaggaccactatgctgtacatctgtgagcggcacttccagaaggttctgaaccggagtctattcacaggcctgcgctccatcacccactttggccgtcccccctttgagcccttcttcaactccctgcaggaggtccacccccaggtccggaagatcggggtgtttagctgtggcccccctggcatgaccaagaatgtggaaaaggcctgtcagctcatcaacaggcaggaccggactcacttctcccaccattatgagaacttctaggcccctgcccgggggttctgcccactgtccagttgagcagaggtttgagcccacacctcacctctgttcttcctatttctggctgcctcagccttctctgatttcccacctcccaaccttgttccaggtggccatagtcagtcaccatgtgtgggctcagggacccccaggaccaggatgtgtctcagcctggagaaatggtgggggggcagtgtctagggactagagtgagaagtaggggagctactgatttggggcaaagtgaaacctctgcttcagacttcagaaacaaatctcagaagacaagctgacctgacaagtactatgtgtgtgcatgtctgtatgtgtgttggggcggtgagtgtaaggatgcagtgggagcatggatgctggcatcttagaaccctccctactcccatacctcctcctcttctgggctccccactgtcagacgggctggcaaatgccttgcaggaggtagaggctggacccatggcaagccatttacagaaacccactcggcaccccagtctaacaccacaactaatttcacccaaggttttaagcacgttctttcatcagaccctggcccaatacctatgtatgcaatgctcctcagccctcttctccctgctccagtagtctcccttccaaataaatcacttttctgccaaaaaaaaaaaa

SEQ ID NO: 324 - DNA, 2533 bp, human
tcggcgtccgagcttccggccgggctgtgccccgcgcggtcttcgccgggatgaagcgcccctgcgaggagacgacctccgagagcgacatggacgagaccatcgacgtggggagcgagaacaattactcggggcaaagtactagctctgtgattagattgaattctccaacaacaacatctcagattatggcaagaaagaaaaggagagggattatagagaaaaggcgtcgggatcggataaataacagtttatctgagttgagaagacttgtgccaactgcttttgaaaaacaaggatctgcaaagttagaaaaagctgaaatattgcaaatgacagtggatcatttgaagatgcttcaggcaacagggggtaaaggctactttgacgcacacgctcttgccatggacttcatgagcataggattccgagagtgcctaacagaagttgcgcggtacctgagctccgtggaaggcctggactcctcggatccgctgcgggtgcggcttgtgtctcatctcagcacttgcgccacccagcgggaggcggcggccatgacatcctccatggcccaccaccatcatccgctccacccgcatcactgggccgccgccttccaccacctgcccgcagccctgctccagcccaacggcctccatgcctcagagtcaaccccttgtcgcctctccacaacttcagaagtgcctcctgcccacggctctgctctcctcacggccacgtttgcccatgcggattcagccctccgaatgccatccacgggcagcgtcgccccctgcgtgccacctctctccacctctctcttgtccctctctgccaccgtccacgccgcagccgcagcagccaccgcggctgcacacagcttccctctgtccttcgcgggggcattccccatgcttcccccaaacgcagcagcagcagtggccgcggccacagccatcagcccgcccttgtcagtatcagccacgtccagtcctcagcagaccagcagtggaacaaacaataaaccttaccgaccctgggggacagaagttggagctttttaaatttttcttgaacttcttgcaatagtaactgaatgtcctccatttcagagtcagcttaaaacctctgcaccctgaaggtagccatacagatgccgacagatccacaaaggaacaataaagctatttgagacacaaacctcacgagtggaaatgtggtattctcttttttttctctcccttttttgtttggttcaaggcagctcggtaactgacatcagcaacttttgaaaacttcacacttgttaccatttagaagtttcctggaaaatatatggaccgtaccatccagcagtgcatcagtatgtctgaattggggaagtaaaatgccctgactgaattctcttgagactagatgggacatacatatatagagagagagtgagagagtcgtgtttcgtaagtgcctgagcttaggaagttttcttctggatatataacattgcacaagggaagacgagtgtggaggataggttaagaaaggaaagggacagaagtcttgcaataggctgcagacattttaataccatgccagagaagagtattctgctgaaaccaacaggttttactggtcaaaatgactgctgaaaataattttcaagttgaaagatctagttttatcttagtttgccttctttgtacagacatgccaagaggtgacatttagcagtgcattggtataagcaattatttcatcagttctcagattaacaagcatttctgctctgcctgcaggcccccaggcacttttttttttggatggctcaaaatatggtgctgctttatataaaccttacatttatatagtgcacctatgagcagttgcctaccatgtgtccaccagaggctatttaattcatgccaacttgaaaactctccagtttgtaggagtttggtttaatttattcagtttcattaggactatttttatatatttatcctcttcattttctcctaatgatgcaacatctattcttgtcaccctttgggagaagttacatttctggaggtgatgaagcaaggagggagcactaggaagagaaaagctacaatttttaaagctctttgtcaagttagtgattgcatttgatcccaaaacaagatgaatgtatgcaatgggatgtacataagttatttttgcccatgcctaaactagtgctatgtaatggggttgtggttttgtttttttcgatttcgtttaatgacaaaataatctcttaatatgctgaaatcaagcacgtgagagtttttgtttaaaagataagagacacagcatgtattatgcacttcatttctctactgtgtggagaaagcaataaacattatgagaatgttaaacgttatgcaaaattatacttttaaatatttgttttgaaattactgtacctagtcttttttgcattactttgtaacctttttctatgcaagagtctttacataccactaattaaatgaagtcctttttgactatt

SEQ ID NO: 325 - DNA, 2279 bp, human
gtgctctgtactgaaattattgctgagagggcccggctgaaagcagaacaggaggcagaagagcccagaaaaactcactctgaagaattcaccaatagcttgaaaacaaaatcacagtaccatgatctgcaggctccggataaccagcagactaaagacatctggaagaaagtggcagaaaaggaggaactggagcaaggatctaggccagcaccaaccctggaagaagagaaaatccgatcactctccagttcttcaagaaatattcaacaaatgttggcagattcaatcaatcgtatgaaggcatatgcatttcaccagaagaaagaatctatgaagaaaaaacaagatggagaaataaatcaaatagaaggagagagaacgaagcagatttgtaagagctggaaagaagactcggaatggcaggcatctctgcgaaaatccaaagcagctgatgagaagagacgctccttggctaaacaagcacgagaagactacaagaggttatccctcgcggcccagaaaggaagaggcggtgagaggctgcaaagccccttgcgtgttccgcagaaaccagaaagacctccccttccacccgagcctcagttcctaaactcaggggcatatcctcaaaaacctcttagaaatcagggagtggtgaggacactgtccagctctgcccaagaggacatcatccggtggtttaaagaggagcagctaccacttcgagcgggctaccagaaaacctcagacaccatagccccctggttccatggaattctcacactcaagaaagcaaatgaacttcttctgagcacaggcatgcccggcagttttctcatccgagtcagtgaaaggatcaaaggctatgccctgtcctatctgtcggaggacggctgtaaacatttcctcatcgatgcctctgcagacgcctacagcttcctgggcgtggaccagctacagcatgccaccttggcggatttggtggaatatcacaaggaggaacccatcacttccctggggaaggagctccttctctatccccgtggtcagcaggaccagctgcctgactacctggagctgtttgagtgacagcctccatcagggtcatcctacagcctccaagcgggctttcccctggacaaatgccactgcaacatttatgtgtgaagccaaaatcaccctgcagcagagccaatactgatcaactgaaagtaaagtatccatggagtcctcattgacacctcttttctgcacaaatactggaattcaatgtcaagagaaaatgacctctgctcaaaagggagaagagtctcaatttcagcaagtacctgtcatgaagggtatgaccttaatgatgtacataaaataaaacaaatgaagaaatggaaaacttttagaaattaaggtgtacttgaaaacgaatatctatcatatgacccctgcactccctctgtatcatctcaggaggtttcaggggcctgttgacatgaagtttcgaagtttcatgttggctttggaatggtagcaaaagcctttcctggctgggatgatgcttaaaacacacctcacttattgtacatgttggaaccaggacatgagagacatagaaaaacagaagtcatgaatgtaaattgaatgagaggcttaacatgcatgaaaatacagatggacctgcaggaaagtgagcaaacatcgctgagtttgttttcttgttcgggagaatggggccggggctggcctggcctcccctggatatactctatagtgcaccaaaaggataaagcatctgtacatgtatttttttattttttatcagaagtgcttagacaagaacagaataagcaggctgtttggatgctacttgtggttgaattgtgttccccaaaatatatggtgaagtcttaacccccatccccgtgaatgggaccttgtttggaaatagggtctttgcagatatagtcaagatgaggtcacattggattagggtgggccccaaatccaatgactggcatccttaggagaagagagagttttggtaatagacacaaatgcagtgggaagaagaccaggggacaagaggcaagttggagtgatgcagccggaagggaagggacaccaaggatctccggccaccagcagaagccagcagagaggcatgggacaggttccccacaagccttagaaggaagcatggccctgacttcagaattccagactccagaactggaagaataaatgtctgttgttttaagctgcttaaaaaaaaaaaaaaaaaa

SEQ ID NO: 326 - DNA, 1420 bp, human
cccaaatatatatttaatcttgtggttcaaataagcttttggctcacatctaagcacatcataaagaacgctgtagaagaggtgacatgatgaggcgggaagacgaggaagaggagggaacaatgatgaaggcaaaaggggacttagagatgaaggaggaggaagagattagtgagacaggagaactggttggcccttttgtgagtgctatgcccactccaatgccccacaacaagggcacccggttctctgaggcatgggaatatttccacctagctcctgctcgtgctgggcaccatcccaaccagtatgccacctgccgcctgtgtggcaggcaggtgagccgtggccctggggtcaacgtgggcaccactgcactgtggaagcatctgaaaagcatgcacagagaggagctggagaagagtggccatggtcaggctgggcagcgccaggatccaaggccccacgggccccagctccccacaggcattgagggtaactggggtaggctcctggagcaggtgggcaccatggctttgtgggccagccaaagggaaaaggaggtgcttaggagggaaagggcagtggaatggcgggagagggctgtggaaaaaagggagcgagccctggaggaggtggaaagggccatcctggagatgaagtggaaggtgagggctgagaaggaggcatgccagcgggagaaagagctgcctgcagcagtacatcccttccattttgtttaaattgggcttggagaatctattctgaaaacattgactctagacttgtagaaaagagccattttagtttcaactcaaatgtaaagcaaagtagtttggtgacattttgcttttatgtgaaatagtgcacagtatgagttaatctgagcaggtctgaattgaccaaatgcttatctacgaggttcctagagctctgctgacccttggccgaaactctaaaatgtacctattaaagataaatgcttctaccaaagtaaaactctgtgagttgtttcagggcagaatgtaccagccagtcagcgttgtttaacaaaataatcagatttttgcctagcactcggttttggtggagctgacgattttgagggctgaggctggttaggtagctggaatgtgcctatgtgaccagctcacttgcagacaccctgccggaagcagagcttaatcttcctaggactgaggtcttagcacatgtactggtggagtttccagaccaccagtatgaataaaagcttgttctgtgtgacccagcaagtggaaggacaaagaactgtgagcctcagatctttggacctttccaatgcgtctctttctcctgttattgctgcaatgtattttcttgcttatattaaagttgtttcatcagtaaaaaaaaaaaaaaaaaaaaaaaaaaaaaaaaa

SEQ ID NO: 327 - DNA, 2282 bp, human
gcagcggcggcccacacagcagcgagaggcgagaggaggctgcctcgaggatgaagtgcaaacccaaccagacgcggacctacgaccccgaggggttcaagaagcgggcggcgtgcctgtgcttccggagcgaacgcgaggacgaggtcctgttagtgagtagcaaccggtacccggaccgctggatcgtgccgggcgggggcatggagcccgaggaggagccgggcggtgcggcggtccgagaggtgtacgaagaagcgggagtcaaggggaagttaggccggctcctgggcgtcttcgaacagaaccaggatcgcaagcacagaacgtacgtgtatgtactgactgtcacggagctgctggaggattgggaagattcggttagcattgggaggaagcgagagtggttcaaagtcgaagatgccatcaaggttctccagtgccacaagcccgtgcacgccgaatatctggagaaactaaagctgggcggttccccaaccaatggaaactccatggccccatcctcgccagatagcgatccctaatgaacagcaaagatgttcagtattgtgctgaaagaaacattgatgtgaacccagtgatcagtggaattgtcaagtacaggtgagcacttctgtgttcccaagaagacagctcatctggtttcttcctgcatcttgggacactccttccctgtctataccactgactcttgctctggttgttgtactcttatacgtgaatagactcttaattcagcacctatagccttttgttgtgcttttttgatgtgtctgccttcattagactatgatgtctttgagagcaaagactatttttccttactctttgcatattctgcatctgagacactacttgaaatatggttggcatcactgaaggttctttgattcaattaatattttgtaatcaccgtgtggcaaaacattccccttccaatctggtgctagtagagtatatgctatctaggcaccatgtgtgtggcttttgtgtatcaggtgtttcagaaatatttcaagacggttgtaagatgtttgaggacaagaattattactcctatttctatgtcataccacacagtagctgcacagttttaagattatgccatcacctagggtaatgttttgtagaatcagtccttcgtgtaacaactctagtgtttttgtactgttgatgatttacttaaattttattcaaaaactatcacttgctataaaggtaattgtaaaaataaatacagtggacgcaaaataatgttgtgagtttttataaaaataaattttaaaatgatatataagacatttttttgcaatgcctgccctaaccacttcttacatgtcatcttaacatctctttgaggaaacactgtttcctcattttacagatttaacatactgtattatttgatgccagagccaacaggctatatcataggcagtttccaaacttaattatgccatttagtttgtctagatttcttttgcctctctcactgatccatttggctgtagttttcatcccttttccagtacacacagctagctcctcatcctacctggtttctgcatatgagaatgcagagggctgagagagggcaaaattgttgtcatttagaaaaggcatttaggaaagaggctgctattagaggggaacacaaagtgaaggtttttttaaaaaagaggacttgcatcagctgcctccagaacaattttaagaaaataacaaagatgtttagaagaaatcttacggagtttgccatgggatgtgtgatatcagcagtcttcagctccttacaaattaccaaaagtggttctaatatgctagtttgtttgattttttcttttatattataaagcaattgcatcgataaaagcttggactccattttagtgtgacactcttcctcatgataccagtgaaatgtattgattgtgtccccagttgttacataatttgaaataaaaatataacttcttgatttattgttttttaagatgtgatatggtactgtggttatgttgttttaaaaaatgattatcttttagagaagtatactgaaaaatgtacaggtgaaatgatatgttactggtattcgcttcaaaatcatctgagtgtggggtaattgagtacatagatgaaacaagattggccataaattggtaattgctgaagctgtgtgatggatgtttgagagttcattatactattctctatacttttgtatatgtttgaaattttccataataaaaattgaaaaaagt

SEQ ID NO: 328 - DNA, 2279 bp, human
ggcacgagggcctctgtctccatctctgccctttgaaacaaaagggtatttcttttctctcttcagcccccaacccagtggaggcccggcttgggacattgttcacttcccctcgcttcccctctagaagccccctttgccatccctgcaccttgtttcgggtgatgcccgagagggagctgtggccagcggggactggctcagaacccgtgacccgtgtcggcagctgtgacagcatgatgagcagcacctccacccgctctggatctagtgatagcagctacgacttcctgtccactgaagagaaggagtgtctgctcttcctggaggagaccattggctcactggacacggaggctgacagcggactgtccactgacgagtctgagccagccacaactcccagaggtttccgagcactgcccataacccaacccactccccggggaggtccagaggagaccatcactcagcaaggacgaacgccaaggacagtaactgagtccagctcatcccaccctcctgagccccagggcctaggcctcaggtctggctcctacagcctccctaggaatatccacattgccagaagccagaacttcaggaaaagcaccacccaggctagcagtcacaaccctggagaaccggggaggcttgcgccagagcctgagaaagaacaggtcagccagagcagccaacccaggcaggcacctgccagcccccaggaggctgcccttgacttggacgtggtgctcatccctccgccagaagctttccgggacacccagccagagcagtgtagggaagccagcctgcccgaggggccaggacagcagggccacacaccccagctccacacaccatccagctcccaggaaagagagcagactccttcagaagccatgtcccaaaaagccaaggaaacagtctcaaccaggtacacacaaccccagcctcctcctgcagggttgcctcagaatgcaagagctgaagatgctcccctctcatcaggggaggacccaaacagccgactagctcccctcacaacccctaagccccggaagctgccacctaatattgttctgaagagcagccgaagcagtttccacagtgacccccagcactggctgtcccgccacactgaggctgcccctggagattctggcctgatctcctgttcactgcaagagcagagaaaagcacgtaaagaagctctagagaagctggggctaccccaggatcaagatgagcctggactccacttaagtaagcccaccagctccatcagacccaaggagacacgggcccagcatctgtccccagctccaggtctggctcagcctgcagctccagcccaggcctcagcagctattcctgctgctgggaaggctctggctcaagctccggctccagctccaggtccagctcagggacctttgccaatgaagtctccagctccaggcaatgttgcagctagcaaatctatgccaattcctatccctaaggccccaagggcaaacagtgccctgactccaccgaagccagagtcagggctgactctccaggagagcaacacccctggcctgagacagatgaacttcaagtccaacactctggagcgctcaggcgtgggactgagcagctacctttcaactgagaaagatgccagccccaaaaccagcacttctctgggaaagggctccttcttggacaagatctcgcccagtgtcttacgtaattctcggccccgcccggcctccctgggcacggggaaagattttgcaggtatccaggtaggcaagctggctgacctggagcaggagcagagctccaagcgcctgtcctaccaaggacagagccgtgacaagcttcctcgccccccctgtgtcagtgtcaagatctccccaaagggtgtccccaatgaacacagaagggaggccctgaagaagctgggactgttgaaggagtagactctgcgaccagtacagaccctgtcctggctgaacaagaagagacacatgctccacttgggagcctttgccaccacgcaactcagggctcaagatgaatgggagggagagatttgagtccaagcatacatttatattcagtgttgtgccattgagttcccatgtggatcattctgaaggtgatctccacaagagggtgtgtgtgtgtgtgtttggtgtgtgtgtggagggggggccgctggatacatcactgaagctattgatataacacaatgagtcactgttcagaaaaaaaaaaaaaaaaaaaaa

SEQ ID NO: 329 - DNA, 1227 bp, human
ggcacgagggcatcaactccagtgtccgttttctctggttttgtgaagactgcacaaaactctcatgatggagaaccaaaggacttagttacctgtttcagtgtcatctaaagtcaactgaaaagtgaagcaggcagtaatacagccatggaaagaaattcaagtttatggaagaacctaatagatgaacacccagtctgcacaacctggaagcaagaggccgaaggagccatttatcatcttgccagtattttatttgtagtaggtttcatgggtggcagtggattcttcgggctcctttatgtcttcagtttgctggggttgggttttctctgttctgctgtctgggcttgggtagatgtctgtgcagctgacatattttcctggaattttgtactgtttgtcatctgcttcatgcaatttgttcatattgcatatcaagttcgcagcataacctttgcccgagaattccaagtgttgtacagctcccttttccagcccctggggatctctttgcctgtcttcagaacgattgctttgagctctgaagtggttactttggaaaaggaacactgttatgccatgcaggggaaaacttccattgataaactctccttgcttgtttcaggaaggatcagagtgacagttgatggcgaatttctgcattacatttccccccttcagttcctggattctcctgagtgggattcactgagacccacagaggaaggcatttttcaggtaaccctcactgcagaaactgattgtcgatatgtgtcttggaggagaaagaaattatatctgctctttgctcagcatcgctacatctcccgccttttttcagtgctaattggcagtgacattgcagataaactctatgccttgaatgacagggtatatataggaaaaagatatcactatgatattcggctacccaacttctatcaaatgtcaactccagaaatacgcagatcacccctgacacaacattttcagaattccagacgatactgtgataaatgacatcaaagtctgaaatttataagtataaaaaaagactctctcttcatcattccccagtgaaatagcaaaatacaaaaaaagagctccctaatgtttttataaatcaaattcagaagcgagatgccattgccaactgttttattcctttcaacaactgcattggaataaactttacaaatttttcttgaaaaaaaaaaaaaaaaa

SEQ ID NO: 330 - DNA, 2035 bp, human
ccccatcccgcttcgccccggaaaagctgacaagaacttcaggtgtaagccctgagtagtgaggatctgcggtctccgtggagagctgtgcttggaagagaaggacgctggtgggggctgagatcagagctgtcttctggcccagttgcccccatgctgctgtcatggctaacagttctaggggctggaatggtcgtcctgcacttcttgcagaaactcctgttcccttacttttgggatgacttctggttcgtgttgaaggtggtgctcattataattcggctgaagaagtatgaaaagagaggggagctggtgactgtgctggataaattcttgagtcatgccaaaagacaacctcggaaacctttcatcatctatgagggagacatctacacctatcaggatgtagacaaaaggagcagcagagtggcccatgtcttcctgaaccattcctctctgaaaaagggggacacggtggctctgctgatgagcaatgagccggacttcgttcacgtgtggttcggcctcgccaagctgggctgcgtggtggcctttctcaacaccaacattcgctccaactccctcctgaattgcatccgcgcctgtgggcccagagccctagtggtgggcgcagatttgcttggaacggtagaagaaatccttccaagcctctcagaaaatatcagtgtttgggggatgaaagattctgttccacaaggtgtaatttcactcaaagaaaaactgagcacctcacctgatgagcccgtgccacgcagccaccatgttgtctcactcctcaagtctacttgtctttacatttttacctctggaacaacaggtctaccaaaagcagctgtgattagtcagctgcaggttttaaggggttctgctgtcctgtgggcttttggttgtactgctcatgacattgtttatataacccttcctctgtatcatagttcagcagctatcctgggaatttctggatgtgttgagttgggtgccacttgtgtgttaaagaagaaattttcagcaagccagttttggagtgactgcaagaagtatgatgtgactgtgtttcagtatattggagaactttgtcgctacctttgcaaacaatctaagagagaaggagaaaaggatcataaggtgcgtttggcaattggaaatggcatacggagtgatgtatggagagaatttttagacagatttggaaatataaaggtgtgtgaactttatgcagctaccgaatcaagcatatctttcatgaactacactgggagaattggagcaattgggagaacaaatttgttttacaaacttctttccacttttgacttaataaagtatgactttcagaaagatgaacccatgagaaatgagcagggttggtgtattcatgtgaaaaaaggagaacctggacttctcatttctcgagtgaatgcaaaaaatcccttctttggctatgctgggccttataagcacacaaaagacaaattgctttgtgatgtttttaagaagggagatgtttaccttaatactggagacttaatagtccaggatcaggacaatttcctttatttttgggaccgtactggagacactttcagatggaaaggagaaaatgtcgcaaccactgaggttgctgatgttattggaatgttggatttcatacaggaagcaaacgtctatggtgtggctatatcaggttatgaaggaagagcaggaatggcttctattattttaaaaccaaatacatctttagatttggaaaaagtttatgaacaagttgtaacatttctaccagcttatgcttgtccacgatttttaagaattcaggaaaaaatggaagcaacaggaacattcaaactattgaagcatcagttggtggaagatggatttaatccactgaaaatttctgaaccactttacttcatggataacttgaaaaagtcttatgttctactgaccagggaactttatgatcaaataatgttaggggaaataaaactttaagatttttatatctaaaaaaaaa

SEQ ID NO: 331 - DNA, 1720 bp, human
gactgcagatgaaattagtaactggtggggtcgtggggtgtgaatggtgggcgggagcagctatgtcagttggtgtgtttctgcttatgttagggtaattgggcacggcctttgtgtaactggtgaatatctctgaacctgggcatgaaacagagagatgtcctaactctgggtgagaggaatcctcatttttctctgccctctcactgtggcatcctaagaaaaaagttttgggttcctgcagcatgaaggagagctctgctcccagaatttgggagctccagatttcttccagggtgtggaggcatcaatatatcagtctgggaaaggggttcctgggccactccaggagctgagttgggtggaaggtgctgagagtgtgggtgggggccacttctgagcacccatgtggcacccactgctggtccctgtttgtggctgggcactcaggaaaatgtttttggtgctaagagtaaaaagccaaccaacaaacacatctcttttttctgtctattcactggaaagtaaaagcagtctgggcgcaggctggggacccagatggaattcaaacttatgcctgctctcaaggtgctcacggttgctgataaacagctggataaaatgaagagtctatgagtgagggatgcagagccagggaaggctggtggagtgatgccaccagcacaggggtatgagtttgcagctgccaaggggccaagggatgagctggggccctccttcccaatggcatctccccctggtctggaactgaagacactgagcaatggtccccaagccccaaggagatcagctcccctgggcccagtggccccaaccagggagggtgtggagaatgcctgcttctcctcagaggagcatgagacccatttccagaaccctgggaacacgagactgggcagctcacccagtccccctgggggtgtctcctcactgccccgatcccagcgggatgatctgtcccttcattcagaggaggggccagccctggagcccgtgagccgcccggtggattatggctttgtttccgccctcgttttcctggtgagtgggattcttctggtggtgacagcatacgccatcccccgtgaggctcgagtcaatccggacacagtgacagcgcgggagatggaacgactggagatgtactacgcccgcctaggctcccacctggacaggtgcatcatcgcaggcctcgggctgctcacggtgggcggcatgctcttgtcggtgctgctcatggtctccctgtgcaagggcgagctgtaccgccggaggaccttcgtccccggcaagggctccaggaagacctacggctccattaacctgcgcatgagacagctcaatggggatgggggccaggccctggtggagaatgaagttgtccaggtctcagagactagccacaccctccagaggtcttaagaactagcccaccttatctggctgctttagctccagtgctacaaggtccaccccctgctcccgcccacctgacccctgccaaggccctggggttttaaactgagctcacatagggccttgtggaagaagtactgggtgctggagggagagctcggggcccagcccatgccccacacgggcaagcagcccactgatctgttttgtagctgaggttttgcatacggttttgtttggaggatggcttctgctgctaaaaatacaaaagtttggaaaccgc

SEQ ID NO: 332 - DNA, 2288 bp, human
gcctgtcgcaggcgtgcagggacctggactccgcctcgtccccggggctcgggcagccgagccatggcggggaactgtggggcccgcggcgcgctgtcggcgcacacgctgctgttcgacctgccgcccgcgctgctcggagagctctgcgctgttctggacagctgcgacggcgcgctgggctggcgcggcctggcagagagactttcaagcagctggctggatgttcgtcatattgaaaagtatgtagaccaaggtaaaagtggaacaagagaattactttggtcctgggcacagaaaaacaagaccatcggtgaccttttacaggtcctccaggagatgggacatcgtcgagctattcatttaattacaaactatggagcagtgttgagtccttcagagaagagttatcaggaaggtggatttccaaatatattattcaaggaaacagccaatgtcaccgtggataatgttcttattcctgaacataatgaaaaaggagtactgcttaaatcttccatcagctttcaaaatatcatagaaggaactagaaatttccacaaagacttcctaattggagaaggagagatttttgaggtatacagagtggagattcaaaacctaacatatgctgtcaaattatttaaacaggagaaaaaaatgcagtgtaagaagcattggaagaggtttttatctgagcttgaagttttactactgtttcatcacccaaacatactagagttggctgcatattttacagagactgagaagttctgtctgatttatccatacatgagaaatggaacactttttgacagattgcagtgtgtaggtgacacggccccactcccttggcacattcgaatcggtatattaataggaatatccaaagccattcactacctgcacaacgttcaaccatgctcggtcatctgtggcagtatatcaagtgcaaacatccttttggatgatcagtttcaacccaaactaactgattttgccatggcacacttccggtcccacctagaacatcagagttgtaccataaatatgaccagcagcagcagtaaacatctgtggtacatgccagaagagtacatcagacaggggaaactttccattaaaacagatgtctacagctttggaattgtaataatggaagttctaacaggatgtagagtagtgttagatgatccaaaacatatccagctgcgggatctccttagagaattgatggagaagagaggcctggattcatgtctctcatttctagataagaaagtgcctccctgccctcggaatttctctgccaagctcttctgtttggcaggccggtgtgctgcaacgcgggcaaagttaagaccatcaatggatgaagttttaaatactcttgaaagtactcaagccagcttgtattttgctgaagatcctcccacatcactaaagtccttcaggtgtccttctcctctattcctggagaatgtaccaagtattccagtggaagatgatgaaagccagaataacaatttactaccttctgatgaaggcctgaggatagacagaatgactcagaaaactccttttgaatgcagccagtctgaggttatgtttctgagcttggacaaaaagccagagagcaagagaaatgaggaagcttgcaacatgcccagttcttcttgtgaagaaagttggttcccaaagtatatagttccatcccaggacttaaggccctataaggtaaatatagatccttcttcagaagctccagggcattcttgcaggagcaggccagtggagagcagctgttcctccaaattttcctgggatgaatatgaacagtacaaaaaagaataaattctaccagaagataaagaaaaaagcaagtattgcataggcacctgagcataggtatgaccttgggaagacattggctccataagcaatgccaagagaatgatcaatagtgagtttgggtgatgcagataaacaatctggataattccatttcttttttcccaaaccctcaaacagagtgccttaaaaaattgttttatcaggataattgtctcatgaccaaatccacgctcaattagagccattcaaaattccttaagatcatgggttctgacttcagccaaacaaaacaatcaaaacctaccaaaaagggactggattgtaatgtcctctccatcatcctcagtgtgagtcctcagagcctccatctgccaagaacattcagttggattccatcgtttggtttagcttgcttgcacgggttgtaggaaatg

SEQ ID NO: 333 - DNA, 1658 bp, human
actccaaagctcaagtcggcccccgtcttttctttccacacccctgtgcccgtcgcatgctggccgggtgagcggccgggccgaggattcgggtgcccggggccgcgtcgccccgtcgggtactgagctgagcgcaccatggccggctgctgctgcctgtccgcggaggagaaggagtcgcagcgcatcagcgcggagatcgagcgacagcttcgtcgggacaagaaggacgcgcgccgtgagcttaagctgctgctgctgggaactggtgaaagtgggaaaagcacctttatcaagcagatgagaattatccatgggtctggttacagcgacgaagacagaaaggggttcacgaagctggtttaccaaaacatattcaccgccatgcaagccatgatcagagcgatggacacgctaaggatacagtatgtgtgtgaacagaataaggaaaatgcccagataatcagagaagtggaagtggacaaggtctccatgctctccagggagcaggtggaggccatcaagcagctctggcaagatccaggcatccaggagtgttacgacaggaggagggagtaccagctgtcggactctgccaaatattacctgactgacattgaccgcatcgccacaccatcattcgtgcctacccaacaagatgtgcttcgcgtccgagtgcccaccaccggcatcattgagtatccatttgacttggaaaacatcatctttcggatggtggatgttggtggccaacgatcggaaagacggaagtggattcactgctttgagagtgtcacctccattattttcttggttgctctgagtgaatatgaccaggtcctggctgagtgtgacaacgagaatcgcatggaagagagcaaagccttatttaaaaccatcatcacctacccctggtttctgaattcgtctgtgattttattcttgaacaagaaggatcttttggaagagaaaatcatgtactctcatctaattagctatttcccagaatacacaggaccgaaacaggatgtcagagctgccagagactttatcctgaagctttaccaagatcagaatcctgacaaagagaaagtcatctactctcacttcacatgtgctacagatacagacaatattcgctttgtgtttgctgctgtcaaagacacaattctacagctaaacctaagggaattcaaccttgtctaaaagctgctgcccactcctcccctataacagaagatgtgatttgcaaactccttgttttatttgcaagtgcttctgacatcaccagagccagtcccatgccaggaactaaggatgtcatgtagatcgtggggacagagatgggtgatggaacttggaagatatttgagtttaccaacatactttaaaagtccttacatcccaaattgtgtttataattattttcttgacttttggctataagattttgtgtaatttttgaatttggtgttttctagaatttttaaaagccactttgatttagttttaaatatgtttaaaaatagcgattaaaattatgtaagcaaggagcctgttagtttatagatcatgccttcaaacctctagagttaatttgggtgacttttttaaaaataagaatgttaatgggtttgaagctttttattaaaccttgt

SEQ ID NO: 334 - DNA, 1024 bp, human
ccccacccgaaacacactcagcccttgcactgacctgccttctgattggaggctggttgcttcggataatgacctccaggaccccactgttggttacagcctgtttgtattattcttactgcaactcaagacacctgcagcagggcgtgagaaaaagtaaaagaccagtattttcacattgccaggtaccagaaacacagaagactgacacccgccacttaagtggggccagggctggtgtctgcccatgttgccatcctgatgggctgcttgccacaatgagggatcttcttcaatacatcgcttgcttctttgcctttttctctgctgggtttttgattgtggccacctggactgactgttggatggtgaatgctgatgactctctggaggtgagcacaaaatgccgaggcctctggtgggaatgcgtcacaaatgcttttgatgggattcgcacctgtgatgagtacgattccatacttgcggagcatcccttgaagctggtggtaactcgagcgttgatgattactgcagatattctagctgggtttggatttctcaccctgctccttggtcttgactgcgtgaaattcctccctgatgagccgtacattaaagtccgcatctgctttgttgctggagccacgttactaatagcaggtaccccaggaatcattggctctgtgtggtatgctgttgatgtgtatgtggaacgttctactttggttttgcacaatatatttcttggtatccaatataaatttggttggtcctgttggctcggaatggctgggtctctgggttgctttttggctggagctgttctcacctgctgcttatatctttttaaagatgttggacctgagagaaactatccttattccttgaggaaagcctattcagccgcgggtgtttccatggccaagtcatactcagcccctcgcacagagacggccaaaatgtatgctgtagacacaagggtgtaaaatgcacgtttcagggtgtgtttgcatatgatttaatc

SEQ ID NO: 335 - DNA, 1234 bp, human
agagcccaagatggaatggaaggtgaaaattaggagcgacgggacacggtacatcacaaagagacccgtgcgagaccgaatcctgaaggaacgtgccttaaagatcaaggaagagcggagtggcatgaccacagacgatgacaccatgagcgagatgaaaatggggcgctactggagcaaagaggagagaaagcagcacctggttagggccaaagagcagcgccgtcgccgtgagttcatgatgcgaagcaggttagagtgtctcaaggagagccctcagagcggcagtgagggcaagaaggagatcaatatcattgaactgagtcacaaaaagatgatgaaaaagagaaacaagaaaattttggacaactggatgacaatccaagaactgatgacccatggggccaagtctccagatggcacgagagtccataatgccttcttgtcagtgaccactgtatgaccgaatgaatggaatgcatgcgactgattttaggaggatgctaccagtttcggtagagtatgattgcctcgttcaatgtggcgtttttatatatattttgtgactctttatagtttaaattttttgtaagcaaaaaatacctggtaatttttcatttgtttttcatatactggtaccttctttttggctgagatctttcttttacttgtgatatattcatattactcgtttataaaaaatcaaaaacaaaaggaaagaaaacaaaaaaaacttgcacaaaaatactgaggagccaattaatttcctacttcaatgtatctaatgtaagtgaaaatctggatttatttctctagtttacttattttctactttaataataactcaatgccaaaatatttctatgcttgtttcttggcataatacattttaaatcaaacctgttcgtaataaatcatgtgccacatcttgtcttacacataaaagccactgcttttaacatcccattgtacatttaacacataaatggtgttaacatcccattgtacatttaacacataaatggccattgtctttgtctcagtaaagtgtaggtggacaatcttcctgtgatatgtagtgacattggtcatgtagctagataattatggtaattgtgacaattaaagagaaataaattattgattatccttcagaaaaaaaaaaaaaaaaaaaaaaaaaaaaaaaaaaaaaaaaaaaaaaaaaaaaaaaaaaaaaaaaaaaaaaaaaaaaaaa

SEQ ID NO: 336 - DNA, 3051 bp, human
aaggaagtttgcctctggtaccaccttgggactaagtgtatacccaactaagtcccttcatctccctggaccctgccttcaatcatccctcctcttgcaggtctccaacatgctaccggtgatagtgggcccattagtaatgggctcccacttgtcctccatcaccatgtggttttccttggccctcatcatcaccaccatctcccactgtggctaccaccttcccttcctgccttcgcctgaattccacgactaccaccatctcaagtaaggaccttctccccacaatgggtccctaggcaacaaccatcaccctccctccttaagcttctgatagcaggcactggtatctcagtttacatgtgagtgctagttggggaagaggtctgatggctgggaaaataaccacactgggatgaccttactcttttccttctgaaattgggtcctcctccaactgggggttttaaacctatatttggactctgggccctttgaataagctctggacattctctttagaaaagtacatatatgcataaaactcctgcaggcaatcacaagtaagtcatgtatctctgaaagccccagactttttcaagtgtagtctacaaacctcctataccagaatcacctgagatgcttgtttaaaatataggctcttgaattccactccaaatatgctgaactaaggtatctgggggagcagggcctggaaacctgcattttagttaagtgttccaggggattctgatgctggtgatctcatacctgaagaagcctagttctgctagagattctcagactgtgggcatcaatcacatagcaagcttttcaaaggaggactccagatacggcaaattgcaggtttggagtggcccccgggagatgcattggtagcaactccccagcttattctgatgcagatggtcaggatggtggtgacaggtgtggggtaggagggctgagaaatgtgtgaggctggcacaaatgaaatgggatctgcacggaagcctccagcatgggcactgcagtgccgtcctctctcttctaggttcaaccagtgctatggggtgctgggtgtgctggaccacctccatgggactgacaccatgttcaagcagaccaaggcctacgagagacatgtcctcctgctgggcttcaccccgctctctgagagcatcccagactccccaaagaggatggagtgagagacagcctaagtgtcatcctggctgtccctcagccatgggatgcagacacggcttcctgattgcacctaacaatttgcctccttcggccacacgccctaatgatggcaccaccagggtagagggaaggtcggcttcccggaaaagcagggccaaggatgaggctttcttcaaactactgcccttgatgtccctcaatgggatcaggagttagcttaagaaaaaggaaaacacagctccccagactggaggctggtcagagggaggagacccctggtcctctgctgtggaaggagaggggttcagccccagataactcctttgtggcctgggcaggatgcagagaatgacaaggctgaaaggagggggactggaggctgcctggctccagcgagagctccttctgggaccagagggtgggacggccaggtatcactttgccccttcctgccccaaaaggctttcacatacccgactcaggccagagccaagacaccctggcaaatcattataggtctcaattcatgacataccagatgccagtcgccacttcacccaacacacacacaaacatacacacaccaaacactctgagtgagtggtaaaggccccgtttttactctggcccaccgcaaacaaaaggtttccctctgtgggggagaaaaagaaatccaggagctcctccctggattaaaaccaacgaggtgcagaccaaactttaacacctttagccttatgtggaaaccaaaaaccaactgctgggaaactgtgaaaagcccttttacccacaaggggaggggtcaaagttgctgccctttggggacacccgagacccctaattagcctatctgaatgaggaccaaaggttagagccctctttctccccgaagaaagagcccggaaaaacatggcagagcaaagagcaaaatcctttctcccccgaatgctttaccagtttctcagcaacatttattcaagatgatttttaccaggaaccttatcaaaggcaaaaccacagctgcttgggttgaagtccccatcctggcctcctctcagccgccagacatggccaggaaccctgtggttcccaagaacaatttaaagatcactctttgatttgaaagaccaccattatcattttactaaattcttatatatacttgtgccttttccaactttcagttctcttaagaaaaacatccactgtagctttataaaataccttagtatcagctaggtccaagtctccaggcaggactatcaaaatggactccttcttcctatcagctctagaaccccagaggacttgcccagtaggccagctgagcacttaccaggcagcatctccctggccttccacagtctcgcctgtctgtctctggccttggtggacctggctccctccctaggaggcttttgccctcagcttgaatacagttcctggtgcatcaaagctgtaagttctcagctgctggcctgcactcatcacctcttcctacaaataaacatttggaaaaaagtccatcttcaatatgcttaaagagaagggtaggagataaggagaaagaacagatacggtttttttcccctttaaggcctttagattttgaggtactgtaaggggcctagaaggacaaaaggctttcattccctcttccttttggcaggcaggttatcagtccttggcagaagggcccagccctatccttttctgtatcaaacaaaatccttgaggttggtatacaagttaaggctgaaaaaaggccttaaattcccagtaaagaatgtgaaagcaagcatgtaaaataaactggtcttcatgaaaaaaaaaaaaaaaaaa

SEQ ID NO: 337 - DNA, 1860 bp, human
gcggatcctcacacgactgtgatccgattctttccagcggcttctgcaaccaagcgggtcttacccccggtcctccgcgtctccagtcctcgcacctggaaccccaacgtccccgagagtccccgaatccccgctcccaggctacctaagaggatgagcggtgctccgacggccggggcagccctgatgctctgcgccgccaccgccgtgctactgagcgctcagggcggacccgtgcagtccaagtcgccgcgctttgcgtcctgggacgagatgaatgtcctggcgcacggactcctgcagctcggccaggggtgcgcgaacaccggagcgcacccgcagtcagctgagcgcgctggagcgcgcctgagcgcgtgcgggtccgcctgtcagggaaccgaggggtccaccgacctcccgttagcccctgagagccgggtggaccctgaggtccttcacagcctgcagacacaactcaaggctcagaacagcaggatccagcaactcttccacaaggtggcccagcagcagcggcacctggagaagcagcacctgcgaattcagcatctgcaaagccagtttggcctcctggaccacaagcacctagaccatgaggtggccaagcctgcccgaagaaagaggctgcccgagatggcccagccagttgacccggctcacaatgtcagccgcctgcaccggctgcccagggattgccaggagctgttccaggttggggagaggcagagtggactatttgaaatccagcctcaggggtctccgccatttttggtgaactgcaagatgacctcagatggaggctggacagtaattcagaggcgccacgatggctcagtggacttcaaccggccctgggaagcctacaaggcggggtttggggatccccacggcgagttctggctgggtctggagaaggtgcatagcatcacgggggaccgcaacagccgcctggccgtgcagctgcgggactgggatggcaacgccgagttgctgcagttctccgtgcacctgggtggcgaggacacggcctatagcctgcagctcactgcacccgtggccggccagctgggcgccaccaccgtcccacccagcggcctctccgtacccttctccacttgggaccaggatcacgacctccgcagggacaagaactgcgccaagagcctctctggaggctggtggtttggcacctgcagccattccaacctcaacggccagtacttccgctccatcccacagcagcggcagaagcttaagaagggaatcttctggaagacctggcggggccgctactacccgctgcaggccaccaccatgttgatccagcccatggcagcagaggcagcctcctagcgtcctggctgggcctggtcccaggcccacgaaagacggtgactcttggctctgcccgaggatgtggccaagaccacgactggagaagccccctttctgagtgcaggggggctgcatgcgttgcctcctgagatcgaggctgcaggatatgctcagactctagaggcgtggaccaaggggcatggagcttcactccttgctggccagggagttggggactcagagggaccacttggggccagccagactggcctcaatggcggactcagtcacattgactgacggggaccagggcttgtgtgggtcgagagcgccctcatggtgctggtgctgttgtgtgtaggtcccctggggacacaagcaggcgccaatggtatctgggcggagctcacagagttcttggaataaaagcaacctcagaacaaaaaaaaaaaaaaaaaagcggagctcacagagttcttggaataaaagcaacctcagaacaaaaaa

SEQ ID NO: 338 - DNA, 4390 bp, human
ctctagctctcagcggctgcgaagtctgtaaacctggtggccaagtgattgtaagtcaggagactttccttcggtttctgcctttgatggcaatttccttcggtttctgcctttgatggcaagaggtggagattgtggcggcgattacagagaacgtctgggaagacaagttgctgtttttatgggaatcgcaggcttggaagagacagaagcaattccagaaataaattggaaattgaagatttaaacaatgttgttttaaaatattctaacttcaaagaatgatgccagaaacttaaaaaggggctgcgcagagtagcaggggccctggagggcgcggcctgaatcctgattgcccttctgctgagaggacacacgcagctgaagatgaatttgggaaaagtagccgcttgctactttaactatggaagagcagggccacagtgagatggaaataatcccatcagagtctcacccccacattcaattactgaaaagcaatcgggaacttctggtcactcacatccgcaatactcagtgtctggtggacaacttgctgaagaatgactacttctcggccgaagatgcggagattgtgtgtgcctgccccacccagcctgacaaggtccgcaaaattctggacctggtacagagcaagggcgaggaggtgtccgagttcttcctctacttgctccagcaactcgcagatgcctacgtggacctcaggccttggctgctggagatcggcttctccccttccctgctcactcagagcaaagtcgtggtcaacactgacccagtgagcaggtatacccagcagctgcgacaccatctgggccgtgactccaagttcgtgctgtgctatgcccagaaggaggagctgctgctggaggagatctacatggacaccatcatggagctggttggcttcagcaatgagagcctgggcagcctgaacagcctggcctgcctcctggaccacaccaccggcatcctcaatgagcagggtgagaccatcttcatcctgggtgatgctggggtgggcaagtccatgctgctacagcggctgcagagcctctgggccacgggccggctagacgcaggggtcaaattcttcttccactttcgctgccgcatgttcagctgcttcaaggaaagtgacaggctgtgtctgcaggacctgctcttcaagcactactgctacccagagcgggaccccgaggaggtgtttgccttcctgctgcgcttcccccacgtggccctcttcaccttcgatggcctggacgagctgcactcggacttggacctgagccgcgtgcctgacagctcctgcccctgggagcctgcccaccccctggtcttgctggccaacctgctcagtgggaagctgctcaagggggctagcaagctgctcacagcccgcacaggcatcgaggtcccgcgccagttcctgcggaagaaggtgcttctccggggcttctcccccagccacctgcgcgcctatgccaggaggatgttccccgagcgggccctgcaggaccgcctgctgagccagctggaggccaaccccaacctctgcagcctgtgctctgtgcccctcttctgctggatcatcttccggtgcttccagcacttccgtgctgcctttgaaggctcaccacagctgcccgactgcacgatgaccctgacagatgtcttcctcctggtcactgaggtccatctgaacaggatgcagcccagcagcctggtgcagcggaacacacgcagcccagtggagaccctccacgccggccgggacactctgtgctcgctggggcaggtggcccaccggggcatggagaagagcctctttgtcttcacccaggaggaggtgcaggcctccgggctgcaggagagagacatgcagctgggcttcctgcgggctttgccggagctgggccccgggggtgaccagcagtcctatgagtttttccacctcaccctccaggccttctttacagccttcttcctcgtgctggacgacagggtgggcactcaggagctgctcaggttcttccaggagtggatgccccctgcgggggcagcgaccacgtcctgctatcctcccttcctcccgttccagtgcctgcagggcagtggtccggcgcgggaagacctcttcaagaacaaggatcacttccagttcaccaacctcttcctgtgcgggctgttgtccaaagccaaacagaaactcctgcggcatctggtgcccgcggcagccctgaggagaaagcgcaaggccctgtgggcacacctgttttccagcctgcggggctacctgaagagcctgccccgcgttcaggtcgaaagcttcaaccaggtgcaggccatgcccacgttcatctggatgctgcgctgcatctacgagacacagagccagaaggtggggcagctggcggccaggggcatctgcgccaactacctcaagctgacctactgcaacgcctgctcggccgactgcagcgccctctccttcgtcctgcatcacttccccaagcggctggccctagacctagacaacaacaatctcaacgactacggcgtgcgggagctgcagccctgcttcagccgcctcactgttctcagactcagcgtaaaccagatcactgacggtggggtaaaggtgctaagcgaagagctgaccaaatacaaaattgtgacctatttgggtttatacaacaaccagatcaccgatgtcggagccaggtacgtcaccaaaatcctggatgaatgcaaaggcctcacgcatcttaaactgggaaaaaacaaaataacaagtgaaggagggaagtatctcgccctggctgtgaagaacagcaaatcaatctctgaggttgggatgtggggcaatcaagttggggatgaaggagcaaaagccttcgcagaggctctgcggaaccaccccagcttgaccaccctgagtcttgcgtccaacggcatctccacagaaggaggaaagagccttgcgagggccctgcagcagaacacgtctctagaaatactgtggctgacccaaaatgaactcaacgatgaagtggcagagagtttggcagaaatgttgaaagtcaaccagacgttaaagcatttatggcttatccagaatcagatcacagctaaggggactgcccagctggcagatgcgttacagagcaacactggcataacagagatttgcctaaatggaaacctgataaaaccagaggaggccaaagtctatgaagatgagaagcggattatctgtttctgagaggatgctttcctgttcatggggtttttgccctggagcctcagcagcaaatgccactctgggcagtcttttgtgtcagtgtcttaaaggggcctgcgcaggcgggactatcaggagtccactgcctccatgatgcaagccagcttcctgtgcagaaggtctggtcggcaaactccctaagtacccgctacaattctgcagaaaaagaatgtgtcttgcgagctgttgtagttacagtaaatacactgtgaagagactttattgcctattataattatttttatctgaagctagaggaataaagctgtgagcaaacagaggaggccagcctcacctcattccaacacctgccatagggaccaacgggagcgagttggtcaccgctcttttcattgaagagttgaggatgtggcacaaagttggtgccaagcttcttgaataaaacgtgtttgatggattagtattatacctgaaatattttcttccttctcagcactttcccatgtattgatactggtcccacttcacagctggagacaccggagtatgtgcagtgtgggatttgactcctccaaggttttgtggaaagttaatgtcaaggaaaggatgcaccacgggcttttaattttaatcctggagtctcactgtctgctggcaaagatagagaatgccctcagctcttagctggtctaagaatgacgatgccttcaaaatgctgcttccactcagggcttctcctctgctaggctaccctcctctagaaggctgagtaccatgggctacagtgtctggccttgggaagaagtgattctgtccctccaaagaaatagggcatggcttgcccctgtggccctggcatccaaatggctgcttttgtctcccttacctcgtgaagaggggaagtctcttcctgcctcccaagcagctgaagggtgactaaacgggcgccaagactcaggggatcggctgggaactgggccagcagagcatgttggacaccccccaccatggtgggcttgtggtggctgctccatgagggtgggggtgatactactagatcacttgtcctcttgcccgctcatttgttaataaaatactgaaaac

SEQ ID NO: 339 - DNA, 1225 bp, human
ggtctcgtttggagcgggagtgagttcctgagcgagtggacccggcagcgggcgataggggggccaggtgcctccacagtyagccatggcagcgctgcgctacgcggggctggacgacacggacagtgaggacgagctgcctccgggctgggaggagagaaccaccaaggacggctgggtttactacgccaatcacaccgaggagaagactcagtgggaacatccaaaaactggaaaaagaaaacgagtggcaggagatttgccatacggatgggaacaagaaactgatgagaacggacaagtgttttttgttgaccatataaataaaagaaccacctacttggacccaagactggcgtttactgtggatgataatccgaccaagccaaccacccggcaaagatacgacggcagcaccactgccatggaaattctccagggccgggatttcactggcaaagtggttgtggtcactggagctaattcaggaatagggttcgaaaccgccaagtcttttgccctccatggtgcacatgtgatcttggcctgcaggaacatggcaagggcgagtgaagcagtgtcacgcattttagaagaatggcataaagccaaggtagaaacaatgaccctggacctcgctctcctccgtagcgtgcagcattttgctgaagcattcaaggccaagaatgtgcctcttcatgtgcttgtgtgcaacgcagcaacttttgctctaccctggagtctcaccaaagatggcctggagaccacctttcaagtgaatcatctggggcacttctaccttgtccagctcctccaggatgttttgtgccgctcagctcctgcccgtgtcattgtggtctcctcagagtcccatcgatttacagatattaacgactccttgggaaaactggacttcagtcgcctctctccaacaaaaaacgactattgggcgatgctggcttataacaggtccaagctctgcaacatcctcttctccaacgagctgcaccgtcgcctctccccacgcggggtcacgtcgaacgcagtgcatcctggaaatatgatgtactccaacattcatcgcagctggtgggtgtacacactgctgtttaccttggcgaggcctttcaccaagtccatggtttcagactgcctggtagaaggaggtcacttctgattgtcagtgactttgagctgagtgctgaaataaaatgataaacaagtc

SEQ ID NO: 340 - DNA, 1974 bp, human
tggcatttctgcattcgaagaagaatctgagagaaacctgacgcagggagcatgggtatctggacctcaggcactgatatcttcctaagtctttgggagatttacgtgtctccaagaagccccggatggatggactttatccagcatttgggagtttgctgtttggttgctcttatttcagtgggcctcctgtctgtggccgcctgctggtttctgccatcaatcatagcggccgctgcctcctggattatcacgtgtgttctgctgtgttgctccaagcatgcacgatgttttattcttcttgtctttctctcttgtggcctgcgtgaaggcaggaatgctttgattgcagctggcacagggatcgtcatcttgggacacgtagaaaatatttttcacaactttaaaggtctcctagatggtatgacttgcaacctaagggcaaagagcttttccatacattttccacttttgaaaaaatatattgaggcaattcagtggatttatggccttgccactccactaagtgtatttgatgaccttgtttcttggaaccagaccctggcagtctctcttttcagtcccagccatgtcctggaggcacagctaaatgacagcaaaggggaagtcctgagcgtcttgtaccagatggcaacaaccacagaggtgttgtcctccctgggtcagaagctacttgcctttgcagggctttcgctcgtcctgcttggcactggcctcttcatgaagcgatttttgggcccttgtggttggaagtatgaaaacatctacatcaccagacaatttgttcagtttgatgaaagggagagacatcaacagaggccctgtgtgctcccgctgaataaggaggaaaggaggaagtatgtcatcatcccgactttctggccgactcctaaagaaaggaaaaacctggggctgtttttcctccccatacttatccatctctgcatctgggtgctgtttgcagctgtagattatctgctgtatcggctcattttctcagtgagcaagcagtttcaaagcttgccagggtttgaggttcacttgaaactgcacggagagaaacaaggaactcaagatattatccatgattcttcctttaatatatctgtgtttgaacccaactgtatcccaaaaccaaaattccttctatctgagacctgggttcctctcagtgttattcttttgatattagtgatgctgggactgttgtcctctatccttatgcaacttaaaatcctggtgtcagcatctttctaccccagcgtggagaggaagcgcatccaatatctgcatgcaaagctgcttaaaaaaagatcaaagcagccgctgggagaagtcaaaagacggctgagtctctatcttacaaagattcatttctggcttccagtcctgaaaatgattaggaagaagcaaatggacatggcaagtgcagacaagtcatgagagaccccgactactcctcagccacatcgcaccaacaattctcttcaggtctaggatggcagtcactattcatgccggataatagagaactatgtgacgcagtcctctcaggagtctgagtttacagagccaacttgcagcacctggttatgcctcctttcatctcaaagccaaagagctgccaggtaaatggttatgtggtctatgttccaaacaaaccacatgatcttgcctgtgtcacaatgtaacaagactctagctgggtcccctggtgatgagtttcagcatagaataatgttcaaggaaaagaaaacgaaaacagtttaaatctctaccacagcctcacaagcaaatgctaaggggaacatacatgtaaaaagccagcaaactatcttcaaactcttccgtccttaatgtcttccatggctattgcccccacaatggtctcttttctccctgctcccttattaaagaactctttctgaaaccctttttttttttttttttttt

SEQ ID NO: 341 - DNA, 1313 bp, human
gtcaagatggcgggagcagctacccaggcttccctggagtcggccccacggatcatgcggctggtggccgaatgcagccgctccagggcccgggcaggcgagctgtggctgccgcatgggacagtggccactcctgtgttcatgccagtgggcacgcaggccaccatgaagggcatcacgaccgaacagctggacgctctgggttgccgcatctgcctgggcaatacctaccatctgggtctaaggccgggacccgagctgatccagaaagccaacggtctccacggcttcatgaattggcctcataatctgctaacggacagcggcggtttccagatggtgtcgctggtgtctctgtccgaggtgacggaggagggcgtccgcttccgctccccctacgacggcaatgagaccctgctgagcccggagaaatccgtgcagatccagaatgcgctgggctcggacatcatcatgcagctggacgacgtggttagcagtactgtgactgggccacgtgtggaggaggccatgtacaggtcaatccgctggctggaccggtgcattgcagcccatcagcggccggacaagcagaacctcttcgccattatccagggtgggctggacgcagatctccgggccacctgccttgaagagatgaccaagcgagacgtgcctggcttcgccatcgggggcctgagcgggggtgagagcaagtcgcagttctggcggatggtggcgctgagcacctctcggctgccgaaggacaagccccgatatctgatgggggttggctatgccactgatctggtagtctgcgtggctcttggatgtgacatgttcgactgcgtcttccccacacggacagcgcgctttggctctgccctggtgcccactgggaacctgcagttgaggaagaaggtgtttgagaaggacttcggccccatagacccggagtgcacctgccccacgtgccaaaagcacagccgcgccttcctgcacgcactgctgcacagtgacaacacggccgcgctgcaccacctcacggtccacaacatcgcctaccagctgcagctcatgagcgccgtccgcaccagcatcgtggagaagcgcttcccggacttcgtgcgggacttcatgggcgccatgtacggggatcccaccctctgtcccacctgggccactgacgctctggcctctgtgggaatcacacttggctgacctggcattgggagagggagggaggaaggaagggagggaggggctggaagatactgaaggattcctttttgaaaggtttttttttattgtaactt

SEQ ID NO: 342 - DNA, 7053 bp, human
gcgagctgagctgacagcgcggagctggcgctgtggagcgcagggagccttgccggttcctccgaccggcgtctgcgagtacagcggcggctaacctgccccggcttcaggatttacacagacgtggggcgatgcttgtgaccctgcagctcctcaaaggcccctagaagcctgtttctccgtacagtccaggacctccagccccatggagcccccgatcccacagagcgcccccttgactcccaactcagtcatggtccagccccttcttgacagccggatgtcccacagccggctccagcacccactcaccatcctacccattgaccaggtgaagaccagccatgtggagaatgactacatagacaaccctagcctggccctgaccaccggcccaaagcggacccggggcggggccccagagctggccccgacgcccgcccgctgtgaccaggatgtcacccaccattggatctccttcagcgggcgcccctgctctgctacctgcctgccaccggctgcgtgaagctggcccagcgtggctacgaccgtctgcgccgccctggttgccgctgcaagcacacgaacagcgtcatctgcaaagcagccagcggggatgccaagaccagcaggcccgacaagcctttctgacagtttgtgtcgaagccccagtgctctgcctggaaacctggttctcttctgacatctaagaagactgcagcaaggtcagaggttttagcctcctgaggctgaccttgctagtctgcccactccctacccccagcttcggaaaatacagagaccaccaccacgtaccctgtattccccaaggtgatgaagaagcactttggggctttttttcagggtcctgaaactttgtgtcaaacagacaatgcaggggcagggtgtggtttggggggaaatttttctttttcagaagacagaacacagatgtggacacatatccggaaactgcagctgcttgaatgccttcccagcccctccttctccctccctccctccgccccccccttcctcttttccattgtctttggctctcacaggagctagctgcctgggaggaattgttaactgagtaccagggtacctttaaagaagacccttggagtcttctataccttcttctccttccccatctcactccaccccactttgtccctgatgtcttggggaaggtgtagaacaccctagcagttcctattgtatatacttgggagccactgagaacagaggacggccagtgagtccaagcctcgttcctccttctgcctccccggagccacaggatggatttaggagccactgctcagtgcacttctcccttccaactgcatcaactaactctcgggggtgttctgctcaccacaccgtccttcggttcttactgagtcacagactcgcctgcccactacgtgtcctgggttctctactcagatcccttccagaaactttatatgggtagaggaagccagggcggcaaatgcgagaccaaatatcattttgccaatgagtctgaggctgtggtctctggatccagtcattatgtttttatagaataattaaaccggatgctaacggtgttttaaaaaataataataaaacaacttgtttccttttggccacccccaggaagggctgatttcaaaatctgggggcgagcaacctcaaggaacacaatttccctccctatcaacaagaggattttaacagcaaagaagagaggcagcacctcccattggcagaatgaccgctgagccaggctgggtttgggtttcttctcttctgattctgctgctcactgtcatagccttttgtgtatagtgatgtgtctgtatctttaatgtaaatagagagatgatgaaaaaagagtctattttagtgttaggaagccccagcaggggagtcggaagagcttggaagagctggggagagggtaggggaaaggtttttccaggggccactgggtttgagccctgcttctgtgcacagccacaccaccctctcccgacagccctcaaagacgtagcaactctttctctcaaggtgctaaaggactcagaaggtgcagcacgtccagtgggtaggtacttgttgcatgcaaaagctgtagtgtatctggtccttcctccccagcttttgtgtggggttcttgctttgtgtggtattttgttttcccctctaatgagagggcatggcctgagtcagaagagctaccccaggtgaaactggaagtgcatgaggcagagcgtccgtagcatttccagtttgttctgtataggacagaggtgcctccgggaaggaggcagcgaggtaggtagctatgataggcacctaatgcttctcaaggacttattttttccttcttgaagactagtagtaacatcttatgatttagagtaagttgattgtaaccataggtatttattgattggaggaagggagggtcatattattttcggctttatttatgtaacatttgctagcttataaaaggcgaatgtgaaatattgcatctgcattttccaaggctgattcgtgtagctacccttgccacagttgtgacggatgtatggatgttcttgaacatttcagaaggagtggtagaaaaaaacacacattcagccaaccacttatatgaattgaatgtatcagaagtgtactgaagggactggagatggttttcctcagatgagggggccccaaaattgatagtgcacatctgcacgctttctgcgaggcctcagaacttttcccagggcccctccctcaaattgtctccatgggaaacttgacccagtggcaagttgcactttggtgatcttggtggtctacacacccgttctgtggagagtcgatttacataagctgtgtatacacacacacacacacacacacacacacacacacacacacccctaccccacactgactgtctaccgacagagaccctatttcctggcaaacggcctcctgaaccctgactttttgtgtacatacttgtaaacacggatttttctgggttttggtttgctttttccttttttccccctgcccctgttctagcttgttcttcttggtttgctttcaacctgcttgatggatgtctgcagagtgctctctaagagtccacctcagtgcctcgtgtgctcagtggtcatgggaaggagcgaaggaaccatccttggttctcccagcttggttgtgtagcaatccctcagcattgtttttctcagcttcttggcaaaaattaaaacaacaacaacaacaacaacaacaacaacaaacagaaggataaactggcttgcctgtggaccctccccggctctggggccagtcgagagccactgagggacccagcactcagagacacaacacacatgtgtagctgcttctggctgagtgtgtttcctgtcaccaatggcctgtttggctggacgatgcctcggcttgaccttttttgaaaagtgctggttagttcccgccccctggtaaacctggggtaggtgggggttctgtcttaactcgaggggcacctgggatccaggacgcttctagggggctctggctgcccgtgttaatgaaggacagcgcttccgcgagcaccctgggaactgggtcttgggtagcaaagccctcccagagaaaagatgggcacaactaaggctttcctgagcaggaagggggtgaagaccaatcccttcctttggtcctttggtacgcaccccctcagagctgagatggaagacatggctagttcttttcagccttgtggagcctgtcagtcgccatcatacctcgagtgaggcccagctagataatgacttgtccaagatggcacacgtggaaagttgatctgcaccagaacccggatgactgtcaccttgaagcgtcctgttctccttctgtgctgtcccaggaagtgtctggcgggcgtgggcagcacagctctacactgtacgattcactagggcatcctgcgagcctcactagccttctggttcatgcctttgacaagcatttttgtgccccctctgcttactgtgacagtcgatgatgaatcttgcgttgccattttctgctgtgggtaactgcgtgcagtgtcttgccttgctttctcttcttactgtcccacagcttggtttcatgttacaaacagaaaagctcgaggctcccaccccgccacatcccaacttcatttccccctcactgtagcccatttccaccccaccacaaagttgccacaggttttctttgtatagaatatttattttgaagctctattttaatagtatttattttagaaagtctactattgtaagagttcttctgtttgtgaagaaaaaaacaagttaaaaactgaatgtactgatttagaaaatatatataaatatatattgttaaatatactttgattgcgccactgcactccagccttggcgaccagactaagacgctgtctcaaaaaaaaacaaaaacgacaaaaaaaaaacaaaacagaaaaaataaactaaggcaatgacagtccctggcaaatgctgggagggaggcagcagtggtcagggaaggtaaccctgaagcaggacttgtaaagcaaataagattgggaggccaaggtgggtggatcacgaggtcaggagttcgagaccagcctggccaacatagtgaaaccccgtctttactaaaaatacaaaaaaattagccaggtgtggtggtgggtgcctgtagtcccagctacttgggaggctgaggcaggagaatctcgaacccaggaggcggaggttacagtcagctgagaccgcaccattgcactccagcctgggtgacagagcaagattccgtctcaaaaaaaaaaaaaaaaaaaaaaaccaagaagaaaaggaatgaattagaacttcttctgcttggacttaagggcatcatcaggcaggttttgggtaggatagcaggggaggcagagacatagtcggggtcagtggtcatgagtgtggctttgagcccaaaaacttggtttctgttccctactttgccactcagtagtgcatgactttggccaaatttcttaaattcatgaagcaagtttccgggtgaatgaaatggggataaaaatagtgttcaaacctatccgttggtttgtgtgaaactgaaatgaatagtatcgtgcaggtacttgtgagcaaggggagctgctgtttcctgtccctttatgatgggaaatatctagacaagttcccaaccctctgcactgcaggctgcatggcacggagggtcttgtaacacagctggggctggccttcttttaggagcttcagtggttctgaaaacttttatttgtttgtttgttttagtagatgtggggtctttctgtgttgtccggactggtctcaaacttctggactcaagtgatcctcccccgctcaacctcccaaagtgttgggattacaggtgtgagccactgtgcccagccttgaaaactttttcaggttcttccagggttactgggcaattaaatatttctatttcattataagtcagtttttcaaagttatattatcttaattaccttttttatatgtattagtgtagagtagcattttatattttgatatcctccttatgcatagtttttcactttttattcctagtttttcgtttttaataagactttcaagaaatttattttattggccttttgaaaaaagcagctttagataaagtaagcagttctgctttcattttataatttatttctacttttgtttcattaatcttttcctccggcatgccttggattttgttgtgttactctttttctagaggctcgcattgtgtgtctggttcacttatgatcacgcttgcctacttttaagaatggaagaggggaggtggagggtggctgcacagtcgagggtgtgaggcagtcttgctctagccccaccatgccctcagcccgctgtggccacgctggttcctcaattgctggggcgtgcagtgtctgtaagggaggctactgatgccatccgaggaagatgtaaggtttcgtgtgggcagcgagagcctagcaggcatgtggggtgcccagcaaagggtaacagtggacagttgttgcctcattccacagagttttgattttttttttttttttaatggtcactccatcaacatcccccatggccagagcctgagctggtccccagagacacaggcattcagctgacagcctcgccttcacgctgctgctgttctcatgggggacaggcctcaggtggcaatgcacaaatcattagttaagggcagttgtgacagttaccaaggagtgtagcccccgcccgagtgaaaacagccctaaccaggggtggggaccttggggctctgacccgaagggtaggagaagctggaaggacagcattcctgtctgcgaaggcaggagcaaagctgccaggctatgaaggaaatggctggagcctgaagtcatgcaagctggggctggcagggacagggccaacttccaggcctgggggccaccatgaggattcaggacgtgacccccagggcacatgaaggccttccatctgtatttaagaaaagactttatcagacgagtatggtgctcacgcctgtaatcttagcactttgggaggctgaggcaggtggatcacgaggtcaggagttcaagaccagcctggccaatatggtaaaccccatctctactaaactacaaaatagccaggcatggtggcgcacgcctgtagtcccagctactcgggaggctgaggcagaagaatcacttgaacccgggaggtggaggttacagtgagccaagatcgcgccactacactccagcctgggtgacagagtgagactccgtctcaaaaaaaccaaaagactttatcttatttcctatatgtttgtggtttcagtcctgatgtataatttgaccctagttagaatggttatctgaggaagtggcctgtacgatttctgcttttttaaatgtgtggctccctttcttcattgattaacgtatgattattt

SEQ ID NO: 343 - DNA, 992 bp, human
agcgtttaaacttaagcttggagttatttccaccatgcccgggcaagaactcaggacgctgaatggctctcagatgctcctggtgttgctggtgctctcgtggctgccgcatgggggcgccctgtctctggccgaggcgagccgcgcaagtttcccgggaccctcagagttgcactccgaagactccagattccgagagttgcggaaacgctacgaggacctgctaaccaggctgcgggccaaccagagctgggaagattcgaacaccgacctcgtcccggcccctgcagtccggatactcacgccagaagtgcggctgggatccggcggccacctgcacctgcgtatctctcgggccgcccttcctgaggggctccccgaggcctcccgccttcaccgggctctgttccggctgtccccgacggcgtcaaggtcgtgggacgtgacacgaccgctgcggcgtcagctcagccttgcaagaccccaggcgcccgcgctgcacctgcgactgtcgccgccgccgtcgcagtcggaccaactgctggcagaatcttcgtccgcacggccccagctggagttgcacttgcggccgcaagccgccagggggcgccgcagagcgcgtgcgcgcaacggggaccactgtccgctcgggcccgggcgttgctgccgtctgcacacggtccgcgcgtcgctggaagacctgggctgggccgattgggtgctgtcgccacgggaggtgcaagtgaccatgtgcatcggcgcgtgcccgagccagttccgggcggcaaacatgcacgcgcagatcaagacgagcctgcaccgcctgaagcccgacacggtgccagcgccctgctgcgtgcccgccagctacaatcccatggtgctcattcaaaagaccgacaccggggtgtcgctccagacctatgatgacttgttagccaaagactgccactgcatatgaactagtactaagccgaattctgcagatatcc

SEQ ID NO: 344 - DNA, 1350 bp, human
cgtcgctcccacggcgcccagggtacccccgccgctgtctgcctgtcttcctccattaccgcgcaggcttggtcaccgcattaaggcattcccgctctccgcggaactgctctgccgtctcggcggtgaaagtgtgagagggtccgtagttgggtcaactttgactcctctcgcctgcccggatccttaagggcctcctcgtcctcccggtctccggtcgctgccgggtctgtgcgccggtccgcgcccgccctcgctctgccatgggcgcttccagctcctccgcgctggcccgcctcggcctcccagcccggccctggcccaggtggctcggggtcgccgcgctaggactggccgccgtggccctggggactgtcgcctggcgccgcgcatggcccaggcggcgccggcggctgcagcaggtgggcaccgtggcgaagctctggatctacccggtgaaatcctgcaaaggggtgccggtgagcgaggctgagtgcacggccatggggctgcgcagcggcaacctgcgggacaggttttggctggtgattaaggaagatggacacatggtcactgcccgacaggagcctcgcctcgtgctcatctccatcatttatgagaataactgcctgatcttcagggctccagacatggaccagctggttttgcctagcaagcagccttcctcaaacaaactccacaactgcaggatatttggccttgacattaaaggcagagactgtggcaatgaggcagctaagtggttcaccaacttcttgaaaactgaagcgtatagattggttcaatttgagacaaacatgaagggaagaacatcaagaaaacttctccccactcttgatcagaatttccaggtggcctacccagactactgcccgctcctgatcatgacagatgcctccctggtagatttgaataccaggatggagaagaaaatgaaaatggagaatttcaggccaaatattgtggtgaccggctgtgatgcttttgaggaggcttcagcaaccaggagggattgactgagatcttaacaacagcagcaacgatacatcagcaaatccttattatccagccttcaactatctttaccctggaaaacaatctcgatttttgacttttcaaagttgtgtatgctccaggttaatgcaaggaaagtattagaggggggaatatgaaagtatatatataaattttaggtactgaaggctttaaaaataattaagatcatcaaaaatgctattttgaatgttatcatggctattacacttttacttcctgactttaatattgatgaataaagcaagtttaatgaatcaaaaaaaaaaaaaaaaa

SEQ ID NO: 345 - DNA, 2732 bp, human
agtcccagacgggcttttcccagagagctaaaagagaagggccagagaatgtcgtcccagccagcagggaaccagacctcccccggggccacagaggactactcctatggcagctggtacatcgatgagccccaggggggcgaggagctccagccagagggggaagtgccctcctgccacaccagcataccacccggcctgtaccacgcctgcctggcctcgctgtcaatccttgtgctgctgctcctggccatgctggtgaggcgccgccagctctggcctgactgtgtgcgtggcaggcccggcctgcccagccctgtggatttcttggctggggacaggccccgggcagtgcctgctgctgttttcatggtcctcctgagctccctgtgtttgctgctccccgacgaggacgcattgcccttcctgactctcgcctcagcacccagccaagatgggaaaactgaggctccaagaggggcctggaagatactgggactgttctattatgctgccctctactaccctctggctgcctgtgccacggctggccacacagctgcacacctgctcggcagcacgctgtcctgggcccaccttggggtccaggtctggcagagggcagagtgtccccaggtgcccaagatctacaagtactactccctgctggcctccctgcctctcctgctgggcctcggattcctgagcctttggtaccctgtgcagctggtgagaagcttcagccgtaggacaggagcaggctccaaggggctgcagagcagctactctgaggaatatctgaggaacctcctttgcaggaagaagctgggaagcagctaccacacctccaagcatggcttcctgtcctgggcccgcgtctgcttgagacactgcatctacactccacagccaggattccatctcccgctgaagctggtgctttcagctacactgacagggacggccatttaccaggtggccctgctgctgctggtgggcgtggtacccactatccagaaggtgagggcaggggtcaccacggatgtctcctacctgctggccggctttggaatcgtgctctccgaggacaagcaggaggtggtggagctggtgaagcaccatctgtgggctctggaagtgtgctacatctcagccttggtcttgtcctgcttactcaccttcctggtcctgatgcgctcactggtgacacacaggaccaaccttcgagctctgcaccgaggagctgccctggacttgagtcccttgcatcggagtccccatccctcccgccaagccatattctgttggatgagcttcagtgcctaccagacagcctttatctgccttgggctcctggtgcagcagatcatcttcttcctgggaaccacggccctggccttcctggtgctcatgcctgtgctccatggcaggaacctcctgctcttccgttccctggagtcctcgtggcccttctggctgactttggccctggctgtgatcctgcagaacatggcagcccattgggtcttcctggagactcatgatggacacccacagctgaccaaccggcgagtgctctatgcagccacctttcttctcttccccctcaatgtgctggtgggtgccatggtggccacctggcgagtgctcctctctgccctctacaacgccatccaccttggccagatggacctcagcctgctgccaccgagagccgccactctcgaccccggctactacacgtaccgaaacttcttgaagattgaagtcagccagtcgcatccagccatgacagccttctgctccctgctcctgcaagcgcagagcctcctacccaggaccatggcagccccccaggacagcctcagaccaggggaggaagacgaagggatgcagctgctacagacaaaggactccatggccaagggagctaggcccggggccagccgcggcagggctcgctggggtctggcctacacgctgctgcacaacccaaccctgcaggtcttccgcaagacggccctgttgggtgccaatggtgcccagccctgagggcagggaaggtcaacccacctgcccatctgtgctgaggcatgttcctgcctaccatcctcctccctccccggctctcctcccagcatcacaccagccatgcagccagcaggtcctccggatcactgtggttgggtggaggtctgtctgcactgggagcctcaggagggctctgctccacccacttggctatgggagagccagcaggggttctggagaaaaaaactggtgggttagggccttggtccaggagccagttgagccagggcagccacatccaggcgtctccctaccctggctctgccatcagccttgaagggcctcgatgaagccttctctggaaccactccagcccagctccacctcagccttggccttcacgctgtggaagcagccaaggcacttcctcaccccctcagcgccacggacctctctggggagtggccggaaagctcccggtcctctggcctgcagggcagcccaagtcatgactcagaccaggtcccacactgagctgcccacactcgagagccagatatttttgtagtttttatgcctttggctattatgaaagaggttagtgtgttccctgcaataaacttgttcctgagaaaaaaaaaaaaaaaaaaaaaaaaaaaaaaaaaaaaaaaaaaaaaaaaaaaaaaaaaaaaaaaaaaaaa

SEQ ID NO: 346 - DNA, 615 bp, human
atgacttcggaaatcacttatgctgaagtgaggttcaaaaatgaattcaagtcctcaggcatcaacacagcctcttctgcagcttccaaggagaggactgcccctctcaaaagtaataccggattccccaagctgctttgtgcctcactgttgatatttttcctgctattggcaatctcattctttattgcttttgtcaagacagcctggagctgttgcccaaagaattggaagtcatttagttccaactgctactttatttctactgaatcagcatcttggcaagacagtgagaaggactgtgctagaatggaggctcacctgctggtgataaacactcaagaagagcaggatttcatcttccagaatctgcaagaagaatctgcttattttgtggggctctcagatccagaaggtcagcgacattggcaatgggttgatcagacaccatacaatgaaagttccacattctggcatccacgtgagcccagtgatcccaatgagcgctgcgttgtgctaaattttcgtaaatcacccaaaagatggggctggaatgatgttaattgtcttggtcctcaaaggtcagtttgtgagatgatgaagatccacttatga

SEQ ID NO: 347 - DNA, 500 bp, human
gaattatcaaactttattggcttgttaaaaatgattgaattcagcaagtacatttatgatctatctacattgttaaaacagcactaaaaataaaaatttttaaaatgattatccattatttacagaaaatgtggaaaagatggcttttaaacccagaacattataggaaaaaaaaaaaaaaaacagggcatgagaatgattcacaggctgcctctggattacagcaaatggttgaacatgaagtgcgtgaaactcaaggatttgcgtttcttaggaatctcttgttactttgtatgtgtttatactcaattcataaatggactgtcttacaataaaggtgataaaaaatctctgttcctttctttttgcttttcacactttttttccccataaaaacccactgcagtcatagtcagtagttaggggtgggggttggttaacacattctgggtgctcactcaggaacatgccaaagctatactgcaacactagcctgaatt

SEQ ID NO: 348 - DNA, 500 bp, human; identical to SEQ ID NO: 347

SEQ ID NO: 349 - DNA, 3970 bp, human
aggggctgtgaggtggcagcggctgcagcggcggagccggcgcctcagcgggcactggggtctgttcccccttccccgtccctgctccctgccaggcgcgtgcgggacgccgctcttggtccccacgcctccgccccgccccctcccgggacgccgggagaccccggccgtcctttatccggtgtccgccggcccccggccctgaaacccgggcctcctccccgagggccttgggcgtccctcctggtcctgcgctcgcggcctcgatgctgtctctggcgcggcctccgctcccgccgactggcctgagaacgaggtctgtgccccagtctcccagccgcgacctccgaccccgcctcgcagaacgacccgagctggtctcccgagcccccttctcagcagcccggtgacgtggccagtttatttctgttttgagacgaacggcgaagactcgcgtcgggtcttcgttctagggctagacttggtctctgatcgccgagaggtagcgcaggggctgtgggcccccggcaggggtcctgtcggaagctggccgcgcttctgtttgcgttcccaggaccctggcattgtctctagttgctgcttgtgctctctctttgcttttggtttgcttcatttggcccctggggccctggtaaaaccaggcaccgaatcgctcgcacacagagttccagtccccgcctgctgtctcctcagcagctggggttccgaggagaatgccctgcaagatggctccatcggccatggcgctcctgagaggctgtcagtgctgagtcaccgatctacctcattcgggtgggcagaacttatgtgtgccatgcgagtggctccagaccgctcctgagtgggaggaggggttcctgtagccgttgcgtcttctcaaacacggggagcagagtagaaagaggctctggccccttcccttgtgcccaccgggcctgccgcagtggctcagcagccccttcagtagcccgcctgaggaccgatgccagaggcaggcattcttccggaaaggcccactgaggcaggctccggctcctctggttggggctgttgttttgatggatcgtgtgcttttcccttacctcttatcacttgctgtcatctgttgacttaggcccagtctgcagatgtgtgtagtgttcctttttgggttagctttggcagtattgagttttacttcctcctctttttagtggaagacagaccataatcccagtgtgagtgaaattgattgtttcatttattaccgttttggctgggggttagttccgacaccttcacagttgaagagcaggcagaaggagttgtgaagacaggacaatcttcttggggatgctggtcctggaagccagcgggcctcgctctgtctttggcctcattgaccccaggttctctggttaaaactgaaagcctactactggcctggtgcccatcaatccattgatccttgaggctgtgcccctggggcacccacctggcagggcctaccaccatgcgactgagctccctgttggctctgctgcggccagcgcttcccctcatcttagggctgtctctggggtgcagcctgagcctcctgcgggtttcctggatccagggggagggagaagatccctgtgtcgaggctgtaggggagcgaggagggccacagaatccagattccagagctcggctagaccaaagtgatgaagacttcaaaccccggattgtcccctactacagggaccccaacaagccctacaagaaggtgctcaggactcggtacatccagacagagctgggctcccgtgagcggttgctggtggctgtcctgacctcccgagctacactgtccactttggccgtggctgtgaaccgtacggtggcccatcacttccctcggttactctacttcactgggcagcggggggcccgggctccagcagggatgcaggtggtgtctcatggggatgagcggcccgcctggctcatgtcagagaccctgcgccaccttcacacacactttggggccgactacgactggttcttcatcatgcaggatgacacatatgtgcaggccccccgcctggcagcccttgctggccacctcagcatcaaccaagacctgtacttaggccgggcagaggagttcattggcgcaggcgagcaggcccggtactgtcatgggggctttggctacctgttgtcacggagtctcctgcttcgtctgcggccacatctggatggctgccgaggagacattctcagtgcccgtcctgacgagtggcttggacgctgcctcattgactctctgggcgtcggctgtgtctcacagcaccaggggcagcagtatcgctcatttgaactggccaaaaatagggaccctgagaaggaagggagctcggctttcctgagtgccttcgccgtgcaccctgtctccgaaggtaccctcatgtaccggctccacaaacgcttcagcgctctggagttggagcgggcttacagtgaaatagaacaactgcaggctcagatccggaacctgaccgtgctgacccccgaaggggaggcagggctgagctggcccgttgggctccctgctcctttcacaccacactctcgctttgaggtgctgggctgggactacttcacagagcagcacaccttctcctgtgcagatggggctcccaagtgcccactacagggggctagcagggcggacgtgggtgatgcgttggagactgccctggagcagctcaatcggcgctatcagccccgcctgcgcttccagaagcagcgactgctcaacggctatcggcgcttcgacccagcacggggcatggagtacaccctggacctgctgttggaatgtgtgacacagcgtgggcaccggcgggccctggctcgcagggtcagcctgctgcggccactgagccgggtggaaatcctacctatgccctatgtcactgaggccacccgagtgcagctggtgctgccactcctggtggctgaagctgctgcagccccggctttcctcgaggcctttgcagccaatgtcctggagccacgagaacatgcattgctcaccctgttgctggtctacgggccacgagaaggtggccgtggagctccagacccatttcttggggtgaaggctgcagcagcggagttagagcgacggtaccctgggacgaggctggcctggctcgctgtgcgagcagaggccccttcccaggtgcgactcatggacgtggtctcgaagaagcaccctgtggacactctcttcttccttaccaccgtgtggacaaggcctgggcccgaagtcctcaaccgctgtcgcatgaatgccatctctggctggcaggccttctttccagtccatttccaggagttcaatcctgccctgtcaccacagagatcacccccagggcccccgggggctggccctgaccccccctcccctcctggtgctgacccctcccggggggctcctataggggggagatttgaccggcaggcttctgcggagggctgcttctacaacgctgactacctggcggcccgagcccggctggcaggtgaactggcaggccaggaagaggaggaagccctggaggggctggaggtgatggatgttttcctccggttctcagggctccacctctttcgggccgtagagccagggctggtgcagaagttctccctgcgagactgcagcccacggctcagtgaagaactctaccaccgctgccgcctcagcaacctggaggggctagggggccgtgcccagctggctatggctctctttgagcaggagcaggccaatagcacttagcccgcctgggggccctaacctcattacctttcctttgtctgcctcagccccaggaagggcaaggcaagatggtggacagatagagaattgttgctgtattttttaaatatgaaaatgttattaaacatgtcttctgcc

SEQ ID NO: 350 - DNA, 662 bp, human
  misc_feature (261)..(261): n is a, c, g, or t
  misc_feature (567)..(567): n is a, c, g, or t
  misc_feature (651)..(651): n is a, c, g, or t
gggaagaagccttggctttattcgctctgtggggacactgttccgttcagaggcccctcccagccatggggtgggggacagtggtgggcgtgggaatcccagcgagcatcctggagggtgcgtcgtctccatgtattttgctcttccccatcttttccatggggtcccctgccagggtcaagcactaatatgtggtgaaggcagcaaacagcgtcggcgtccctttaggggtggggagagggctgtagcaccaagaacccnctcccccgccacgacatccctgaaaaggagactaaaataaagccccggggcctttctacgtaggggctccacttaaatatggaatggtggtaggcagagaggcggtggcccagcaatccttaagtccagattaccagctgtggggaggcttccagggggccaggagcaggcttggcagttccagccacagacacgtgggtgaggacggaaatatctccaagggggcacagtatcagaggagcaggatggaagggcttttctgcctgctacggatccttttaaagaaatggtgtgaagccggccggngctcatgcctgaatcccatcactttggaggccgagcgagcagatcacctgaattgcgagtcgagaccagctgccaacatgtganacccgctctct

SEQ ID NO: 351 - DNA, 555 bp, human
  misc_feature (509)..(509): n is a, c, g, or t
tttaaacatttaaactttaatcttaaaaaaaaaataggaatcaatataaaaatgcacaaggtaatgtcgttttcatagttaaaatctgacattgtttatcaaagctagtcagttaagtggacacctgcaactcaaatcccataaacattttagaaacgccaaccacccctcctgaaaggtttgaggaatgaaatttggcagaagctcagctctgtgaaatagctcccgttttttttcttgggaccctacttagttccgtgggctcccattgggagctgattaatttctgccaatcagaacccatccctaacacatcagatgatagtggctttgacctagggaagaagaggttgagcgaagaacccccaccaggtatggtttgagagtccttagttggttttcttgggcgttaggtagtaagaaatccaccaggaaccccagccaaaaccttctcaagtgtcacttgggcagatttgggttatcattcctccttttgaagaagtgagcanacagcctgctttgtttggagaagttgtgggcaggggaggagggttg

SEQ ID NO: 352 - DNA, 599 bp, human
  misc_feature (415)..(415): n is a, c, g, or t
ttttttccttcaaaaaatagtttattctgcacatttcctagtaggctctctgcccaccgttccagggtagcagctactcataacttgtctttctctccaaaaccaagagggccttcccaacagaaaaaccttcagttcccaaagcagcatcgattcttcccctcaccccagcaaacctcggggtggaataatgaatcattcaccttctcccacccctcactgccccgccccaccttcatttgccaggactgtcactggctgatggtcagattttgtctttttcaacttggataccctcaagcatcccagcttttggaggcttccctgggcaacctcatgggcttccacattgaccaggcattacattcagcatccttggacaaaccacccatcagagcagtgggttgtggccagntccctccacccccgactccgccccaatggaagaaaccagaggatcacagggccccaggctgtgccgcctgcagagccaggagctgctgggtgcattgcaacgttctccctgagcaaatcggcatggtcaccacagtccagtcctcagtcaccgacagctctgcccctcggggtcagatcccacc

SEQ ID NO: 353 - DNA, 1901 bp, human
gcaatttcctgctgcagagagcattttaagaaaggacagcattcctgtgacctctgcctaccatccataaaatactcatccccctctcagctctgcctgcagttgaacacaaagacctggaggagactcccacctccttcagggagaagaaaggaggcagcgaagcagattaaaggaacttgtggcttgtggcctttttgtgcaagggccgcctggaaggggagaaaagtgtatgaaagccaccgtggcggttaatgagctgtgagatgaggcgctgctgcggccgctgctgctgacactcgctcccaggctgcacccgccgcccttggcgcttcatgtacatgtgtctattcaggccttgcggaggcgcccagaagagcatccaacacggctgccggggaaagaccgcccaccatgcccacggagaccctacagacaggtagcatggtgaagccggtcagccccgcgggcaccttcacctctgctgtgcccctgcgcatcctgaacaaggagccagactacttccgcaggcaggccgagcccaaccccaagaggctcagcgccgtggagaggctggaggccgacaaggccaagtacgtcaagagccaggaggtgatcaacgccaagcaggagcccgtgaagcccgccgtgctggccaagcccccggtgtgcccggctgccaagcgcgcactgggcagccccacgctcaaagtgttcggcaaccacgccaagaccgagagcggcgtgcagagggagaacctgaagctggagatcctgaagaacatcatcaatagctccgagggccctagctcgggctcggggcacaagcacagctcccgcaactggccgccccaccggtcggaagccactgacctgcaccgtcactccttcgcggagtccctgaaggtctaccccacgcagggccgcaggagcccgcaggagggcggctcccacgtgggcaggagactgctggagcagtcagccgagtccttcctccacgtgtcccacagctcttcggacatccgcaaggtgaccagcgtgaagcccctcaaggccatcccctgcagtagctctgcccctcccctgcctcccaagcccaaaatcgcagccatcgcctccatgaagtcccccgaggccgaccctgtggaaccagcttgtggagtcagccgaagaccctccctccagcggtctaagtcagacttgagtgacagatatttccgagtggacgcggacgtggagaggttcttcaactactgtggactggacccggaagagctggaaaacctgggaatggaaaactttgcaagggctaattctgacataatatccctcaacttccgcagcgcaagcatgatcagctcagactgcgaacagtctcaggacagtaacagtgaccttagaaatgatgacagtgccaatgaccgcgtgccgtatggcatttctgccatcgaaagaaatgctagaatcatcaagtggttatatagcatcaaacaagctagagagtcacagaaggtctcccatgtgtaagacagtgcgtggaaaggagggagcgtgggtctctgtgcttacgcagttgtgaaggttgtgaggtccccttgaagtgttgtgagcttctccactctttgtgttgcttgttgtgcaatgttttcaagttgcatgcttgtcaacatggggactgacctggcttccacgtcaccatcgctatagagcctggctgaacacgcgtcatctgccaaaagtttcaggccagaatctaattagggctttgctcgtaagcaaaactgtttacatgaaaatggtatacaacttcttcgatatttatgtggttcttgtgtttttatatcccgcgctattgtgtcttaattaaaagttttatcaactggcaaaaaaaaaaaaaaaaa

SEQ ID NO: 354 - DNA, 803 bp, human
ccggcacgagaggagttgtgagtttccaagccccagctcactctgaccacttctctgcctgcccagcatcatgaagggccttgcagctgccctccttgtcctcgtctgcaccatggccctctgctcctgtgcacaagttggtaccaacaaagagctctgctgcctcgtctatacctcctggcagattccacaaaagttcatagttgactattctgaaaccagcccccagtgccccaagccaggtgtcatcctcctaaccaagagaggccggcagatctgtgctgaccccaataagaagtgggtccagaaatacatcagcgacctgaagctgaatgcctgaggggcctggaagctgcgagggcccagtgaacttggtgggcccaggagggaacaggagcctgagccagggcaatggccctgccaccctggaggccacctcttctaagagtcccatctgctatgcccagccacattaactaactttaatcttagtttatgcatcatatttcattttgaaattgatttctattgttgagctgcattatgaaattagtattttctctgacatctcatgacattgtctttatcatcctttcccctttcccttcaactcttcgtacattcaatgcatggatcaatcagtgtgattagctttctcagcagacattgtgccatatgtatcaaatgacaaatctttattgaatggttttgctcagcaccaccttttaatatattggcagtacttattatataaaaggtaaaccagcattctcactgtgaaaaaaaaaaaaaaaaaaaaaaaa

SEQ ID NO: 355 - DNA, 2026 bp, human; identical to SEQ ID NO: 199

SEQ ID NO: 356 - DNA, 135259 bp, human
gatcctgttgagaggagtaacattctgagactcacagtggaggcagctgtttcagggttattgggcgtggggtgtttctcggagcgcggcagcctgaagtcatcccccgtttccctcctcaggtacaagaagaacttgaaggccctctacgtggtgcaccccaccagcttcatcaaggtcctgtggaacatcttgaagcccctcatcaggtatgcgtcactctgggagaggacctcgctggggttggaggtttcacccctcagggtccatgggacggccttccctatccacgcatcatggagggcccgtctccagggtgcctgtgtatctggggctccctacccgccctggggtctgcggggggtcacaaggccagcccaggtcatggacaggagtgcagtgccggcctttggcacctgtggggtttgcacctggtgtttaaaagcccccctttgcctgagcccccacactgtgtgaccaccctcaggtgccgtgattttccagagggactcacagatgtcaggaaagctgttatcttcactgttgtggtctgttacagagacagggcacagatttaagtcagcaaaggtaaaaggcacacaaggctgagtccaggaggaccaagtgcaagttcccagctgccctctccgggcggattcatacaggcagtgctccattctcccagcaggaatgtgtgggggaggagggagcatggctggccgcggaagctcaccgagccttggtgcccagggtttttgttgcgggtcagtcatgtaggcacggagcatccacccggctgacctcagccactcggtctccagcccctcctgagatgagacaaataaaacccacccaaggcccccgccctcaatcacattgttggcacaaactctgtggtgttggcccaaggttcccggtgggcaaagacattaccaggccgactctcccaggagctgagaggtttccacccaggagcaggtcacccatggccagccttctctttggaacgtgtggggcttggacacccccagcctgctgagttaagccttgattgcatagcaacccaaataagcggcctaaagaaaggcagccacagcccggaaatgtggcgacttcagtcagcttcttccatatttagacttgttcctgctaaaggatttctgcctcagtattgggaagcaagagctcaaggggctcgtgaggcctgggaggctctgcctgggtcgcatgggcatcttgtattttcttccgttttggctgtatgcatcaggcacaaactgtgtgcacagagccacatgacgggggtggggtggggaagagactgacagatgtcgttcttgcacggtggctctggccctccctgggtgagttctgcaggcgagggaggggctcagagcaggagggcgcaggtgtgcaccagacgggtcaggatagccaggtgaggtggctgcctctgtgagagggcgggaggactcctggagggcctccctaggatgaagcctctggggacagggaggcgcatccctggaggggtcgtcattcttccccagaggtttgcatctcacaggcctttgccatctcccccctcggctccttccacttgttgaagcccactcgtggctctgaggctgctgctgacacaggtctcttctcgtgccccacagacaccgtgtgagtgggtgtgacgctccgtgtacagggagcactcagacagagctggaatgccagctgggacctcggaatccacactgtctccttcccatttccccatccatccctgggaagcatctcggccccccaggagcatggacagctcaggctctcaggcacctgcctgtcttcccaccagccgtctcccgccccaagggctacactgccccgtcccacccttgtccctgtgtccctttgtctcttaatgtgactggtactcagaggaatgttggcaagcactggtccttgggcacatcgagagctactctgcagccagacacagtggctcatgctactaatcatagcactttgggaggccaaggcaggaggatcacttgagcccaggagtgtgacctgggcaagaaagtgagccccacctctataaaaaatataaaaattagccggatgtgtagcatgcgcctgtggtcccagctacacgggaggccaaagcaggaggattgcttgagtccaggacttcaaggctgcagtggcttgtgtttgtgccattgcatttcagcctgggcaacaagcaagaccctgtctcaaaaaaaaaaaaaaaaaaaaagaactgccctgccaggcggcttggagcctttcttttctttcttttttctttctttctttcttttttttttttttttttgagacgaagtctcgcttttgtcccccaggctggagtgcaatggcgccatctcggctcactgctacctctgcctcctgggttcaagcgattctcctgcctcagcctcccaagtagctgggattacaggcacctgccaccacgcctggctaatttttgtgtttttagtagagacggggtttcaccatgttggccaggctggtctcaagctcctgacctcaggttgatccacccgcctcggcctcccaaagtcctgggattacaggcgtgagccaccatgcccggccttcttttcttatcagctcccaaagctgtcattccagggactgaatcgtgtggtcctgaggcacactgggagaattcccagagcagcagacttgagtcagctcctgcttaatagaaggagagatttttggggccaaagagctcctttcatgtcactagaatttcctgccagtttttctcacctactggcctatgccgcacacattcccctattggaaggtgaggttttgtttgtgtttaaccaggcccagcacccttgtgccctatgtgacatgtgacatatttgacatagcaaaaaagctagtcctgtcatttaccttagaaaagtccttagaggggctgggcgcaatagctcacgtctgtaatctcagcactttgggaggctgaggctagcggatcacctgaggtaaggagttcaagaccagcctgctcaacatggcaaaaccccgtctctactaaaaacacaaaaaattagcgggtgtggtggtgggcgcgtataatcccagctactcaggaagctgaggcaggagaattgaggcttgaacccacgaggcagaggttgcagtgagtcaagattgcaccattgcactccagtctgggtgacaagagcgaaactccatctcaaaaaacagagaaaagtccttagagggcgaggcatggtggctcacacctgtaatcccaacactttgggaggccaaggcaggtggatcacttgagcccaggagtttaagaccagcctgggtaacatggcggaacctcgcctctacaaaacagataaaaatcagccaggcatggtggcgcgtaccttagtcccagctattcaggaggctgaggtgggaggattgcttgagttcgagaggcagagactgaagtgagctgagatagcaccactgcactccagcctgggcgacagagtcagactttgttgtacttaagagttctagaaacctctaaggttcttggaaaaaaagttcacctgcttggccaggcacagtggctcacgcctgtaatcccagcactttgggaggccgagatgggaggatcacttgaggtcaggagttcgtgacaagcctgaccaacatggtgaaaccccgtctctactaaaaatacaaaaatcagctgggcgtggtggcgcatgactgtaatctcagctacttgggaggctgacgcaggagaatcacttgaatccaggaggcagaggttgcggtgagccgagatcacaccattgcactccagcctgggcaacaagagtgagactccagtctcaaaaaaaaaaaaaattcacctgctcctcctgttttccacgtggcagcgtgatggtgatggcaccagactgcctgggctcgactgctctgccccttgccatccattacccattaccctcaacaaaagagccaacccctctctgcctcagtttccccatgtggctgacaaggctatttaagtcattccattgtcataataattcactgacttaatacatatagtgtttattttatttttcttccttccttccttttctctttttttttcataggttcttgttccatcagcccggctggagtgcagtggtgcaatcatggctcactgcatccttaacctcctgggctcaagtggtcctcccacctcagcctctcacatagccgggattacaggtgcgcaccactgtgcccagctagtttaaaacaattttttgttgagacagggtctcgctatgttgcccaggctggactggaactcctggcctcaagtgatcctcctttctcagcctctcaaagtgttgggattataggagcgcaccatgttgactgtttagaatagggcctgccaggcaaatactcaatgttagctgctagtactgtgttttttgtttgttgttgttttgttttgtttcattgctttgagacaaggtctcagtctgttgcccaggctggagtgcagtggtgccatcacggctcactgtagcctcgaactcctggactcaggtgatcctcccacctcagccttccaagtagttgggactacaggcacgccaccatgcccagctaaattttgaacttttagtagagacagggttttgccatgttacccaggctcctctccaattcctaacctcaagtaatcctccagcctcggcctctcaaagtgctgggattataggcatgagccactgcacctggccctgatttaaaatgtttttaagttggctgggcgtggtggctcacccctgtaatcccagcactttgggaggccaatgtgggcagattacctgaggtcaggagttcgagaccagcctggccaatatggcgaaaccctatctctattaaaaatacaaaaaattagcggggagtggtggcaggcgcctgtaatcccagctactcaggagggtgagctacgagaatcgcttgaacccgggagacggaggttgcagtgagccaagatcgcgccattgcactccagcctgggcaataagagcgaaactccacctcagaaaaaagaaaaaaaaatcttttaaaactacccttttgtattaatttgattccaatatcttacgcaccttatgtgccagcaccgcaaaacagtactgtgaagtcagccacattttccccattccaaagaagaggaggttggtgctcagagaggttacgcccaagtcgcaccatgagagggggcgtgggctgggatccaacctgagcctgtgtggttctacccctcattctgcctcatgcctggacataagcagctgccaggagaggaccataggaattgggctggggctctggagcccagattgggctccgcagcccattgcctgtgagatcttgggcagccacataacctctctgtttcccaagtcctcatttgtaaatgaaggaagtagaggaactctgaggccctgggtctcgccagacctcctgactcagatccccgcaggtggtgcctgtggctgcaggtctaacaaaaccccagcaactctgccgcacgccgtgttgggagcccctggctgagctggcctgtgggccctttcccgagaggagaggcaagtggcagggccctggctgcacctgtcccagagtccgtgtttggcagagcctggcctgcaggacaggtcagggaggttgcagagaggaaggtgaggggctgggcatgggaggcctccctgcagctctgaagcgggcacctctgtccctgagaatggttcctgcagaggggcaagactccctttgcccttagtgggttcctcccgcccatcacacaggacgttgacagtacttcacagccccggggacaccctccggcatccttccagcagagaccagactgtccccgagtcctgtggcgtctaaatgggcaggcggtgaggacactcctgcaggggtcccaccagccccttccctccgggggctggggtgcaggcactaaggcaggccccgctttcctccctccccttgtgcttggggtgaggggcacactgcactttggtggctattctgcagccccagccttcagcccgggttccctggcctacctggcagtgtccttgaatacagaaacctggcaatccccgccctcctccctcagcccccgggtccgattctttctcgtccactagggggagccagtgcacacagctcggcctccctcggggctcctttaggaaccacctggcgctggtgctggcgctggactgagctgtgggctgagctttgggctgagcactgggcggccgctgtccctttggattctcctacctgtcatgatctccgtattttttgtttttgccacggtaacttgaattattttgatttcacaaaataaacgacattgaaaatacatgaatacttatttcaagactttcaaattgtcataaaataacataaaatatcttcggtttggctgaatacataactttccttttccagtaacaacataattctttacccacattaatagttgtatatcttggccaggcacggtggctcatgcctgtaatcccagcactttgggaggccaaggcgggcggatcacgaggtcaggagatcgagaccatcctggctaacatgttgaaaccccgtctctactaaaaatacaaaaattagccaggcgtggtggtgtgcaccttaatcccagctacttgggaggctgaggcaggagaatcacttgaacccaggaggcggagcttgcagtgagccgagatcacaccactgcactccagcctgggtgacagagcgagactccatctcgaaaaaaaaaaagttgtatatcttaaacatatacaataaagaaataatactgtcctccaaaataaaactcaaatgatatatttatggcaaaaaccaaacctagactatcataaagaaggcggggattacaggcttcttataaaggcgtgctcgcatccatctgtcaatgatccccactttgcaattcatgctgagccttgttactaatagcagtcgtcacagcgagcatgtccaccagacgtcaggcagtggactagacctgcaaatagccttgcattgtcttccgccctcacttaggagggagaacccccactttcagacccaggccctgagagggagtgaattgccctggggcacaagaggagggagaagacggagttgctgcacctggtcagggcatgtctggccttgtggctgcgctgctccctggggtccgagagactgtcctggagacaaacctggagagcctcattggttcctctccttagaagaggtggccaaatgtgaagccaccactgaccccaaaaccgcgagcaactgaggctgccctggggcaggcttcaacctcagagctgctctctctgtgccagtggcttagtgccccctgtctagcctgcatcccccaaaagcgcttcttggcacttccgcgctatctcctatatgcaaattcagggcagatgtaaattggaggcagatatttatttttatgcagatgagccactccagcgtgtttggtgcattggagatctcgtgaaagcaaaatatctcccggcgtgcgctgcttgtgttatgttcgggttttaagtcgtgtcagcgtttacattttcttaatatgaaaaatgcctgcattgttctgccgccaactccccctccctccctgcaaccctcggcctctctgctggcgcctaatcgttctttattctcttgcttctgctttcttagtcacaagtttgggaagaaagtcatctatttcaactacctgagtgagctccacgaacaccttaaatacgaccagctggtcatccctcccgaagttttgcggtaagtgcctgttagaccccagaagccgcatcaatacatcttcgtgcttccaaagggcttggttcagtcccatgaatgtttaaggcttgatttccaaatgtgtgcttggctagatttggctcagaaatctgcggcatcgacaaagatccgcagcaaaaggtgctaactgctgactcagagaaatgaaatggcaaaggttgtatacaggacgggatgttttcctcgcccaccattgcaaaactgatttaaaaaataagccctaacatggcaacggccgtttgttgccttggtgtttaccgtttttgcttttgagcagaaaattaggagaatttcccaggcgtgtggataacgctgtgtacagaatgaagtgttctcagggacgtcacgggtgctctagaaaacgacctgtctcctggatgctgaaagcttaattggtgtgtctgctacaaggcttaaatgtaggcccagatgaatagaggctgcccagaaaggcgtatgccacacagccagtacagggcgcggccagatccagcctgggtctctggacccccagcctgggttccctctgcccctgtgtctccctctctgaggcgctcctttgaaggagcaggcccttgccaaagtacgtgcagggaaggctggtagccttgcaggggtaatggagataataacttctctccggacgccaagtcacatggcaggtgctgggatatagaggtgtttagggagtgtggtctctgccctcatgacactctcagactagtgagggccacaaatcagtgatgacaggggccagaggaggcacagaacccagctggggaggggactggtgtgtgggggtaatccaggaagacttctaggaggaggtagctcttaaagtgagtttcacagggacagttggctagatgaagaggccagggaagcacatttccagcagagggaagccctcctgcaaacatatgggtgaaatattgggagatctggaggcagtgagaagtcccatgtgatcaggcagaagttggtgaacgtgaagctggaggtcaccttgggccgggagtccttggtgccaagcagaggagagtgaactggacctggaggccatgagaggatgatgggaatccctggtcgcccgtgggccctggcaagaccccactcccagacctcactaaagtgatccgggggagtccatggagacggctcagaagatgtatttgtagcagctctgtggtggaagtgatttggtctggtgacaaagggtaactcacatcctcctgtgtgggagagtgatttggggatgaaatggacggcatctgtgaaacacgcagctccggcttctcagtgggtactgggtgcagtctagggcctctggaatgtgcaggtggctggcaacactgagggtgcagggtcctgtgagtcagaggggatgaggtttgggagaggggcttgggcttgggcattgggagctcctgaacttactcagtaggcagccggcacccctgttccatagccatgcagcagaaccccagaggacacgtccaatgctgatgcttttaaatgagcagcttctagactgggggtggggctgagtctggattttctccacccccacatacttcctggtgggtgctgcgagcaccagaggctgagacccactggcacagcggcagggcagggccttggggtgctgaatcctggctgtcatcccagcttgtgacctggggcatgtcaccagaccttgacaagcctcagtttcccaatctgtaaagtagacaaaataacccctctacagtaggcccctcatgagggaccgagacatctctggggagccacttggggcgcagagcgctgtgattaactcacaaaaaacaaccgcacgtggtagcagctcacacgtgcttggctggccaggctcagtccagtgcaccaccttctccgcagacctttcctgcattgtcgggtgcctaaccctgcaccatcttgtgtcactgactgcctcactcccgagctgccaactaatggtcatgtgcccccccatcctgtggccgggtccctgctgtatgcacagtgcccggcacatagtagggcttcaatacgtatttgcctgtgttaaggaaggactgttacctgagcacagagggtcttttcttttctttcttcttcttttcttttttttttttttttgagatggagtcttgctctatcgcccaggctggagtgcaatggcgcaatctcggctctctgcaacctccacctcctgggttcaagtgattctcctacctcagcctcccgagtagctgggattacaggtgtgcacaaccatgcccagctaatttttgtattttcagtagagatggggtttcatcatgttggccgggctggtctcaaactcctaacctcaagtgatccacctgcctcggcctcccaaagtgttgggattacaggcgtgagccaccgtgccgagcacagaggttcttttcacccgaaggctttaaccacctccttcagagtttatccatccttttcagagtccatctgttcattcatgggtttcttgtttcattcaacaaatattttaattgagcatctagtaggcagcaagccctttccaggcactggggataaagtaattaacaaaagggacgaggttcctttagcattaccggccagctctcgtcttaaattcagacacttgcgagagctgagggtggtcacgcccaccttggggctgaccgcatggtaagcaggtgaggctgctctgctggccaggggcctcaggagagactggacatttgctggaggttggactactgcctcttatgcgaacagcccacagcaatgggggattgtgactgtgtgtatgtgagtgtgtgtgtgagctggcagtgtggcacgtgcgcccagagggatgagatgcccaggtgtcctgcaggtggggcatccagccccacccagcgcctccgtggctgccagctgcccctgccaggtgagatcccagcctctgttgtgtctacaggtacgatgagaagctccagagcctgcacgagggccggacgccgcctcccaccaagacaccaccgccgcggcccccgctgcccacacagcagtttggcgtcagtctgcaatagtaagtgagccggggatgtgcctgctcctatgccctggagccctgggagctgtggggcgcttctgggtccagaaatattttccccagacgtttgtctccagcagccaagctgaaccctgcaggaaagataaagcctgagctcatcactgaggccgtggctcgctgctcagtgcctggttgggggggcgcgtgctcgctgctcggtgcctggttggggggcgcatgctcgctgctcggtgcctggttggggggcgcgtgctcgctgctcggtgcctggttggggggcgcgtgcttgctgctccgtgcctcgttgggggggcgcgtgctgggtgcctggtcgggggggtgcgtgtcactgctctgtgcctgattggggggaccggcagtgggtagtggatgggggtctctggggttcccgccccagcttccatcactgctgccccctgccctccgggtacacagacacttcccaccaccttcaaggagggcgtggtcatgggatgtgcttaggtgtaggtgtggggtgtgtcgtgctaggaggaagcttccagagccagtgggcagctgcctctcatggtgatgtataggcctgggtccggtagagacggcacgtggtcactctgcatccctgatccccgcatcaccatgcaccttgctaacacccaggctggacacaggcatagagaagacaggcttgtgctgggctcagccgctgagatttaagggtcattgttaccgcagcgtaacctgtccttcctaataccctttatcagccacatgaccttgaactcacctcttctctcagcttgtttccttattcctgttatactacctttttttggggtggcgggaacagagtcttgctctgcttctcaggcaggagtgcagtggcaccatctcagctcactgcaacctccgcctcctgggttcaagctattctcctgccttagcctcctgagtagctgggattacaggcgcacaccaccacgcctggctaatttttttgtatttttagtagagacagggtttggccatgttgcctggctggtctcgaactcctgacctcaagcgatccacccctctcagcctcccaaagtgctgggattgcaggtgtgagccactgcacctggccacccagggtagattttgaaacattttgaaaggttttgagaactgaggaggctctgggcggcatctgggccaggggaggaggtgcatcggtcacctgcccttactgagccatgtgggcaggggcattcctggggttagagggaagtggattcggccctggggacctgcctgtttctttcttggccaagagtggaggagctcagggaggccagggagggaggcagaatcatggcccccgacgaagtccatgccctcattcccagaacctgtgattaggtcaccttacatggcaaaaggggcttggcagaaatgattaagtaaaggatcttgggatgggaggttatcttgggttctctggtgggcccaaagcaatcgccagcgtctttacaagagggaggtaggagggtcagagtcagagaggagatgtggcagcagaagcagaggccggaggggtgcggggccagaagccaaggcactcaggcacctctagaaactgaaaaaggcaaggaatggattcttccctggagcctccaggtggaacacagtcaggtcaacccctttttgactcctgacacctccaggatgtggtgagataatacatttgggtggtggttttttttttttttttttttttttttgagacagtctcgctctgtcccccaggctggagtgcggtggtgtgagctcagctcaccgcaacctccgctccccaggttcaagcaattctcctgcctcagcctcccaagtagctgggattataggcgcccaccgccatgcctggctaatgtttgtatttttagtagaaacggggtttcaccatgttggccaggctggtcttgaactcctgacctcaggtgatccacctgcctcggcctcccaaagtgctaggattacaggtgtgagccacctcgcctggcccatttgtgttgttttaagctaccaagttgacggtagttactgggaccacatgaaaataaagtaggtggtagtgagtggtgggtagttgcgagtatagggggagggaagtgtgtctaaatcttgttcccagagctagcaagtttgcttccagggtgcttgagcccaggagagggccgggcctggagtgcaaatgtgaagttggctgggcatctcgggtgtatcacagctaaagaggactgctggtgccccagcgtcggtccctagaccagcattatctgatggaactctctgtcaggatggacgaggtctgcacggtccagtatggtagccagtgctcgcgtgcggctagtgcagatgctgaattgctaattttatttcattttaactaaattagaatcatcacatgtgacttgactgtcgtactgcactgcacagctctgaccgattcaccctcgccttccctaactaggcgcacacacgaggagttgtacttaagacattttgtaagcactttgccaataaatgagcaagagactatatgttgaaatagaatgttcaccccaaatatatctggaacacacattttactaccaaatagtacttccttttcctttttcagacattgtgagaatttgcgggtgcgaacaactcttgcactcccaccaccccttaggggccgcccaggaatgctgggcggggcaggcacctgcagtgacctcggtcccctcctgggggcactggtgagaactcagcccttgaccaggctcagccagcagaccagaatttttttttttttttttttttttttgagacaattttttttttgaaatggagtctcactctgttgcccaggctggagtgcagtggcaggatctcggctccctgcaacctccgcctcccgggtttaagcaattctcctgcctcagcctcctgattagctgggactataggcgtgcgccaccacacctggctaattttttttgtatttttagtacaggcagggtttcaccatgttggccaggctggtcttgaactcctgatctcaagtgatccacctgcctcggcctcctactgggataacaggcgtcagccagcacacctagcccgggccaggatattccagccatcaggtgaccgttttccccacgttcctgaagccctgtgtctccagcccgttactggggctctgctgggctgatactgcttccatgtgctgtggcacacagggtcccaggggtgggtctttagctgggagattccagccacgcctttctcgtctcttatcttattgtttagagccacttctctcttcttatcatctaacaaaactttaaaaacgaaaaacaaagcccgggtgcggtggctcatgcctgtaatcccaacactttgggaggctgaggtgggtggatcacctgaggtcaggagttcaagaccagcctggccggtatggtgaaaccctatctctactaaaaatacaaaaaaaaaaaaaaaaaaaaaaaaaagttgggcatggtgtcacacacctgtaatcccagctactcgggagcctgaggcaggagaattgcttgaacctgggaggcggaggtttcagtgagccgagattttgccactgcactccagcccaggagacagagcgagactccctctcaaaaaagaaaaaaaaaaaagaaaaagaaaaaacaagcatagctcacagacttcgaaagccgtctacctgagtgaagtgtgggaaaattgttagccatggctgtaggcctctcggctcctagaaggctaccagagataccattagccctgcattctgagcaggtgcctttcagaacgtactgatgcagggctgttggctttaactgtcactttgccatagtccatccctctcccagggccagttgtaactgtaaaagtccggtccttagctgcttttgggacaatgggccacactgcgcgtgcagcttggagagagaatccctgcagttgcctctttaaattaatattttatgtggtttcattgccaatgattataataaaatggcaataaacattttaaaggaagcactagatatgtaatttgtttggactatgaatgaatgaaagtcattaaaattcataactgaatcctattcacaaatgttaatttgccaagttcaaaagcttacagcagaaagctatcaccttagaatgagctaatgaagttaatatattaaagggaagtcaaagattcaagaggtctttgcttgccatccctgaaaaggaaaaatggaaacctgaggcctgtgtgggcacctgggggaggcaggtacagggcagagcttgagatgtccttaggctgggtggggcaggtcatggctgagctctggcattttcttttttttcctctctctctttttttttttttccctgagatggcgtctcactctgtcgcccaggctggagtgcagtggcacgatctctgctcactgcaacctctgcctcctgggttcaagcaattctcctgtctcagcctcccgagtagctgggactgcaggtgcacgctaccaagtccagctaagttttgtatttttagtagagacggggttttgccgtgttggccaggctggtcgcaaagtcctgacctcaggtgatccacccgcctcagcttcccaaagtgctgtgattacaggcgtgagccactgcacccggctgttactgttttttatttttatttttttagacagaatctcgctccatcacctaggctggagtgcagtggcacaatcttggctcactgcaacctctgccttccagttcggatgattctcctgcctcagcctcctgagtagctgggattacaggtgcctgccaccatgcgagctaaattttttttttgcatttttattttttattttcttttatttattttagttttgttttctgagacaaagtcttgctctgtcacccaggctggagtgcaatgacacgatctcggctcactgcaacctccacctcctgggttcaagcgattctcctgtctcaccctcccgagtatgtgtgactacaggtatgtgccaccatgcccaactaatttttttgtatttttaatagagacgaggtttcaccatgttggccaggctggtctcgaactcttgacctcaggtgatccacccatctcggcctcccaaagtgctgggattacaggcgtgagccaccgcgcctggcctgtttttattttttatcgtagccatcctagtaggtgtcaagtgtagttcattatagttttgtttcacatttcactgatgcctaacgctgttgagcatcttttcatgtattatcggccatttgtttaccttctttggaaaaatgtatattcactagatcgtttgcccattttttgtttggaccgtcttttcattgttgtaaagatttgttgatatatgctagaccctaggcccttatcagatgtatggtttgcagatgttttcttccgtcctatgtgttgtctttacaccttttgatggtattttctgaagcataaaagttacattttgatgaagtccaatttatttatttttttcttttgtcgcttgtgcttttggtgttttatctaagaaatcattgccaaattcaaggccgtgacaattcatgcctatgttttcttccaagagttttaccacttaggggttagatttgggtctttgatacattttgagtagatttttctacatgttgtgaggtgaggtctgatttgcttctttgcgtgttgttacagcaccacttgttgaaaagacttttcctggccaggcagggtggctcacgcctataatcccagcactttgggaggctgaggcgggtggatcacctgaggtcaggagttcaagaccagccttaccaacatggtgaaacacccatctctactaataatacaaaaaaatgtgctgggcatggtggcaggcacctgtaatcccagctactccggggactgagacaggagaatcgcttgaacctgggaggcggaggttgcagtgagccaagatcatgccattacactccagcctgggtgacaagagcaaaagtcatctccaaaaaaagaaaagaaaatacttttctttcccccattcagttgtcttggtaccttgtcaaaaaccaataaacatgagggtttatttctgggcactctaattcttgcctattggtctatatgtttatccttatgccagtgccacacaatcttgattactgtagctttgtagtaagttttgaaattgggaagtgtgagtctgtgagtcctccaacttttttttcaatattgtttaggctattctgcatctctttaatttccatattcattttagtatcagctcgttaatttctgtaaaaggcagctgggatttcaatagggcttgtcctgggtgtgtagaccaattttgagggtattgccatcttgaaaatagtagtcttccaatccatgaacatgggatgtctttccatttatttgggtcttttaactttttttcagtggtattttatggttttcactgtaccagttttttgaacttttttgttaaattttttttttttaatttgtgatgctattgtcaatgtaatttttttttttttttttttttaaagacagagtcttgccctgttgcctaggctggagtgcagtggtgcaatcttggcgcactacaacctctgcctcctgggttcaagtgattctcctgcctcagcctcccaagtagctgggactacaggtgtgtgctaccacgcctggctaattttgtatttttggtagagatggtgtttcaccatgttggccaggctggtctcaaactcctgacctctggtgatctgcctgcatcagcctcccaaagtgctcagattataggcatgagccaccacacccggttgtcaatgtaatttttaatctatctttttgttactgattgctaggttctagaaatacattttttaaatatgttgatcttgtatcatgcaaccctactgaacttgtttattagttctaatatttttgtgtgtggattttttagaattttctatatccaggatcatgtcatctgcaaatagagatggctttacttcttccttttcaacctattgccttttattgcctgattatgcctgactgtaacctccaatacattgttgaataaaaatgataagagcagacatggttgtcttactcctgatcttaagaatcagcagttaagctgggctaagcagcatgtacctatattctcagctatttgggagattgaggtgggaggatcacttgaggccgggagttcaagactagcctggacaacatagcaagaccctgtgtctattaaaaacacacacacacacacacacacaaaagaatcaacagtccttcactactaagcataatgttagctgtgtgcatttcatagatgccctttatcaggttaagaaccatcttttttcttttcttttcttttcttttttttttttttttttgagatagagtctccctctgttgcgtaggttggagcacagtggtgcaattatagatcagtgcaacctcagattcctgggctccagtgatcctcctgtctcagcttcccaagtagctggtactataggtatatactaccatgcctggttaatttttaaatgtgtttagtagagacagggtctcactatgttgcccaggctgggaacatcatttctatttctagtttgttgagtggttggttggttggttggttggtttgttcatgtaaaggtgttaggttttgtgaaatgcttttcatcgccattgagataatcacatggcttttgtcctttatactgttgatatggtgtattatattgattgatttttacatgttgaataaaccttgtattcctgggataaatcatttgtgttcatggtgtataatctttttcatatattgctggatttgctttgcttgtattttgttgaggattttgtatttatatttataagaggtattagtttgtcattttcttgtcttatgatatccttgtctggttttggtgatactggcctcagaatgagttgggaagtgtttcctcctcttctattttttggaagaatttgtaccatattagagttaatttgttaaacattttacagaattcaccactgaagccatctgatcttaggctttactttgtgggaagttttaaaattactaatgtaacctctttgcttgttatatttattcagattttatatttcttcttgagtccattttgattgtttgtgtctttccaggaatttgttcatttcgtctaggttttctaattagttggcatgtaattgttcatagtacttcataatccttttatttgtataatgtcactagtaatgtttcctcttccattcctgattttagtaatttgaatcttcaccctttttttcttggtcagtctagctaaaagcttgtcaatttgttgatcttttcaaggagtcaacttttggttttgatgatgttctctgttattttcctattttctatttatttctactccagtctttattattttcttccttctgcctgtgtcagatttagttcattttctttttccagttttttaaggtggaatgtttatcattttagaatcttgctttttgcaatgtaagcatctatggctataaattactaagtcctgcaatagatgtatctgttagtgtattatttccatgattttaattaatcttaaagtattttctaatttatcttgtaatttttttctttgattcattgatttctaggagtctgttgttaaattttcacatatctgtttttgatttttaattttattttattataattagataacttactttgtatgatttaacttctttcagatgtatggaggcttgttatgtggtataacatatggtctagcctggagaatattcaacggacacatgagaagagtgtacattctattattgttgggtggagtgctctataaatgtcaattaagtctacttggtttttagtatttttcagtcttctgtttctctgtcaatttctgcctagttgttctatttattattgaaagtgggggattgaagtctccagtatcattttaaaattatttatttctcccttcaattatgtctgttttggctccacatgtttaggggctgtattgttaggtgcatacatttttatgattcttactttcttatgaatccttgcatgatgataaaaaaaatgtccttccttgccactagtaacaatttttgtgttaaagtctattttgtcggatattaatatagccattatagctctttttagttactgtttgcatggtgtatctttgttcatctctttactttcaacctatttgtgtctttgaatctaaattgtgtctcttgcagacagcatataattaggtcatgtttttccccattccaccttctttattagattatttaatccatttacatttagtgtgattactggagttacatctgccattttgctatttgttttctatatgtcttttttgttcctttatgtcttcattaataccttcttttgtgttaaatacatactttctagtgtactgtttcaattttttgtttcttttgctatatatatatatatatatttaaagtattttctcaattgttgccttagggattagaatttatatcttaatttataaccatctagttctaattaagaaggattgtggagccaggcgtggtggctgaagcctgtagtctcagcactttgggaggccgaggtgggcggatcacgagatcgagacactgagaccatcctggccaacatggtgaaaccccgtctctactaaaagtacaaaaaaaattagccgggcatggttgcaggcgcctataggcccagctactcaggaggctgaggcaggagaatcacttgaaccggggaggcggaggttgcagtgagccaagatcgcgccactgcactccagcatggcaacagagtgagaatcagtctcaagaaaaagaaggattggggacttgcaaactcttcagagaatacaacttttgggtgttgtcttccaccccgtgctaacactccttctttgccactggaagaaacttgatctgatggtgatcttattagcaagcaggaccatgtggcccttttagtttctccttatctcccagagccaaggtgttaactgagccagtgttcacttttgtcagaaaagaactggtaagtatctgtctttctagtctcttttttcctgtgtgcgtaggatatgctcttcttcggtctcctgtaccatgtggctgtctggagactatacaatccttctctttgcgatcggcctccagggtgggacactggcctcccataggctctggttctgagccgtgtgtgccaatctgacttgccagaacctctaccccattagagttttggggactgacctcactaaggataccaagcagtttctcattccccatctgcctgcaaagaggggcagccctgcagatgtgagactacaggattccagtgccttgttgccacctttcacctcacgacagctccacctcataccaaatcacaactctaaatgcaagactgtgatctgtaccttttttttttctttctttcttttgagacagggtctcactatgttgctcaggttggtttcaaactcctggggccaactaatgttcctgcctcagcctcctgagtagctgggattacaggtgtattgtcacactgcttgtcttttgaacccaggtataatgaggactttgaagtcagattttaacttgaaccctggctctagtcaaccctaggctgtgtgactccagacataataatttgcctgagcctcagttttgtcctctataaaaatgggggcacagtgatgcagtgagtgggctttagtattgcacgtggtgcacagtaggtcctcagtacacagtaggtcctcagtgcacagtggtcactgtgatcgttcacatgcactgcccatttctctgggcatccaggacctccctggctgactctgtgactgagaactttgcaggtcagtggtgcaagctgcagccattcatcccctttcaaatattgggaggggacgtgttgtatttagaagatgcaggaccatctcagagggttgggaaaagcctgggtgcccagctgaggcaggcctgctcagcactccccattatcactgtaatttcaggttgccattcctccctcccccttccctcctgtttctttctttcttgttttgttttgtttgtttgttttgaggcagaggctcactctgtcacccaggttggagtgcagtggcacgatctcgatctcgtctcagtgcaacatccacctccctgtttcaagcaattctcctgccccagcctcctgagtagctgggactacaggcgcgtgccaccgtacctggctaatttttgtatttttggtagaaacggggtttcaccatgttggctaggctggtctcgaattcccgacctcaggtgatccgcccaccttggcctcccaaagtgctgggattacaggcgtgagccactgcacccagcccctactgtttttaattagtcacaatttctccttatttgtgcattcctcgcatgcaaaaccagagaaaaaacatgctctgaattactctaagcacatctcccgaggggaggggtacaagcaagaattctatgctgagagtccccgatgccctccagtgggtggacgactgtcggaaagccaggtgggagtcactggccacagagaacgctgtgctgaccaacaaactgtgctctgtgctccagagtcctcctgcccagcatgcatcttggaactttagttcatggtgtgggtttaatgcagtttgtgcatccttgctgagacgtgaccctggcccgtgcacattgagatgcacgagatgaacgtggtgtgatacgattcaccggcgccctgggcatccccacccagccaggaaacacagcacatctgccaaccagagtcccctggggtcattgctatgcacagcactgactctgtcagtccattgaacaagcctctctctccgagccagcaagtagcggatgggcaggggaggagaaacccaaattgtgggtttctgctctatggagagtagtaattcgatgccggggccctgttcttccgctagctgtgagagcctcagagtagatgtgggtgctcctcaaatgcacgggcagtggaaaacccgcttggctgggagcacggcagctctgggccagtccctcctctttggggacctcagttttctcatctgcctgaggaggttgggctggatgatctcagagtctcttcctgctctgagagtcttttattttattatttatttattttgagatggagtcttgctctgtctcctaggctggagtgcagtggcacagtctcagctcgctgcagcctccacctcccgggttcaaatgattcttctgcctcagcatcccaagtagctgagattacaggagtgcgccaccatgcctggctaattttttttttttttgaagacggagtcttgctctgttgcccaggctggaatgtgatggcacgatcttggctcactgcaacctccgcctcccgggttcaagcaattctcctgcctcaacctcctaagtagctgggattacaggcacgtgccaccacacctggctaatttttgcatttttagtagagacagggtttcaccatgttggtcaggctggtctcgaactcctgacctcgtgatctgcccatgtctgcctcccaaagtgctgggactacaggcgtgagccaccgtacccggccttaatttttgcatttggtagtagaaacagggtttctccatattgcccaggctggtccggaattcctgacctcaagtgatccacccaccccggcctcccaaagtgctaggattataggcgtgagccaccatgccccatctgagagtctacttttaaaggacagcacagagacaaagcagtaggcaaaggggtctttcaggaactcgtcctcataactccacattgtcccgcctgttgagtaggactcagtgggtctccctccccgggaacagtagccagccagggctttggaatcaatggatgcaggctctccagctgcgtgaacccggataagtcactgtagctcactgggcccatttgttcatctgtgacatggaccacctgtgtgcagcctgggaggctgctcagcccctggcattgggacaattttcgtcagtgccattggcttgtagctcagcaaagcctgcacctcccttgttgtttaatatttgcagaccttggggagagagcgccagcatctctgctttccaaatggagaaactgaagctggagaggataaggaaactggccggtggtgatctagctcctacgggaagggagggacagggtttgaaagggtctgtctggcttcctaaggaaccagagaggaggaaaagagcctgtaactttggcacatcctgggagaaaaggacctgcctgccacattcctccctccccagggacactgtctctgtgggccccaggacgccttctccctcccagagaggaaaccaagatgggaaggaggcagggggccaggtccgtattcctgcaacagcaggacctcctgaaggtcacgccagccctcagggcacctcggggagctgtggattgctgctcagtgtccccaacgtgaagcttcagcaaaagcaaaattgccatgaaaccaaaccacccatcgagattggatatgcagaagccttatggctgtggacagagttctaatcaccgtttaagtggattagcagattcctctgtaaatcttggaataaaactaaagcacactcgataccatgtgcacctgataaatcatctgacatagagacgttcccagggggccgtggagcccagcaggaggagcagagatggaaacccaggccgggcttgcctccctgtgccacctctcaattgtgggaccttgagctggtcacctggcctctcctagtgtcgtcctctgatctctaacttgggctcatgaaacgatggtggaaatgaggcagacgatacacacgtggaggaaagacttcacactcagcccggtgggtttcattcgggcccttttcatcatgaccgagtcttccgttacctgttaccacttcacagattctccaggacttagtggtttccgacagcaaccacgtcacacttctcctggtgtttgtggaatttgagcagaactcggccaggcgagtttgcccatggggcgttggcagagggcacgtggtggtgtccagctggtggctggctaggatcatccaagacatgccttatgttcctgcacctctggcctcagtggggactgttggccagtgcacctgcccgcagtgtccccagcctgatgttcccacggtagctgtgcttcttccagggcagctcagggtttccagcaaaaaggttcccgagatcacaggtgggaagagtcaggctctttaggacaggagagaaggacctggcccagaaactgaacagttgcttctgtcaaattctgttgatccacacagggtccttggggacctgtggctgctgtcacagtggcttaaagtaacacatatttattttcttgcgattctggaggtcacaagtcctgaaatcaggatctcggcagggctgcattttttctggaggttctggggggtatctgtttctcttctagtttccagaggcgcctatgctccttggctcccagccctccctcccatctttttcacagcacaccactctggcccagcttcccttgttacatcccctctcccttctgctcactagatcctctgcaagggtctttgtgatcctgtccggtatcttagtctattccggttgctatgacaaagtaccataaacagagtggtttataaacaacggaaatttacttctcatagagctggaggctctatgagtctaagatcaaggtgccaccagattcgggcaagtaactgtagctcgctgggcccgtttgttcagctgtgacgtggaccgcctctgtgtggcctggttggaatgatttttgtcagtgccgttggctcacagctcaacgaagccggcacatcccttttcgtgatgaggattcggtgtaggatgaggacctgcttcctggttcatagatggtgcctcccggccgcgtcctcgcgtggagaaaggggaagctccctggggtcgcttttaaaagagcactctgtctgcctggagtgtctgaggtgagccaggcctttggggaggtctggctgggaaggggcttgtggccggataagcgcctcactgagtacctggtgagtacctgccgtgccaggcactgccagctccatggccccaaaacttggctctgcaggcctcatacatgcagggctgcctttcaggggagtcccgtttacatttattggccccatagagagcaaggaggaagcgtgtgtgcctgcctggcagggtggaatctgccgtggccctcgtagggaacgggggagggaagatgccaagcactgatccaagtcaacgttaagattcaggtacgcgtcatggccaagaatctgagtaaagtttccatgtattttttcttttttagaattgttaagtctctgtgcgagcgtgatttgccgattgtactgtaacaagtcacatagactgcatgttttctgcgtgctggggtccattctcatttaattctcacccgcctgcccaccctgggaggcaggtgctagtatcccgcccatgtgacaggagaggaagtagaagcagaggtgtcgagtagctctcacgcctgctccctgccttccaagtgcactcctagctccacgtggccaaatccaacttcctttttggggtatccctaaaatgcctcctctgcggtaccggactgcgctcagggtatctctcttcctgtgcacaccagtcagcttttgctaattatgctgcataacagtctcactgggctgcaacatgtttctttctcgctaaggttgggaggtagacaggccagcaggggctcggcccacctccatgtacctgcattttggtaccgggctgaagaagtagcctcttgacatgccattctcagggtggggactggaataagagtggccacgccaaactacgctgtctccttggacgtggtatatgttgtgtctgctcacgtcccacagcagggcacatggcccagcccagagtcagtggggcagggaggtgactgccctccaggaaatgaaggtgacacagagaggaaggggacgcttgttgacggcaccacagtctactcccgtgtggctcctgatcagcaccaggtgcggggagcactgccaaaatctgcttctcatcctcccccaagtatgtactgtttgctgggtctcaggccctgtgttggacacttgatttgaagggttaaaaccaggcacaggcttagcgcagtggctcatgcctataatcccagcactttgggaggctggggcgggcggatcacatggtcaagagatagagatcatcctggccaacatggtgaaaccccgtctctactaaaaatacaaaaattagctgggcatggtggtgcgtgcctgtagtcccagctactcgggaggctgaggcaggagaattgcttcaactcaggaggtggaggttgcagtgagcagagattgcgccactgcactccagcctgggggacagagcgagactccatctcaaaacaaacaaacaaacaaacaaaaacagcacaggtcttgcatacacatccccagtcatttccttgggatgaattcctagacatagattcactggatcaaacagtgtgactgtttgtaaggtttttggttgtcgtggaatcaccctccagaaaggtcacgtgctttgtagagcctgaagccgggggtcacaggcagacctcagtggctcaggcaggtggggctggtggcgagaggaaagtccctcatcctaacactcactcacgtgcaatgtgcaaacatagctgatgcgtcagctggaggtgagggccagctggcactggcaggcaggagcccagcctggcttccttgggggccaccaggggtgacatagaccctcagagccagggctgagcatcaggaggttggcagggcctgggggacgccaggagctctcttgcaacaagagagaaaagcagcatcttagagttgtctcagtgcaaaggctcacatcacagtcagccccagcaaggccagggagacccagtcgaatactttgaccccaggtgggcctgtgtttgtctttgtgtgtgtccagcattgtgttctgttttgatgagaatgtatgccatgggctacgttttcattttcatcttggtgaaggtttacgttgttgatgacctgtggactctaaggatcagggagaggaccctgcatccagaggtgggcagttggaatgtaaacccctcacgaggccagctgtggacaggcacggaagcctttctctctctggaccccttttccttatccatgaagtgggtaacagtagcctgccttgcccaccacattatttccagtgaaacaatgcattttgcaagcggtaaagctgtgtatttcagaaataaatgcccagtaaaaactctttcagataaaccaaagctgagagaatgtattttcagcagaactacactataagaaatgttaagggaagctctgcagaacaaagaaatagaatgccaaatagaaattgggatcctcacaaaggaatgaagcatgctgaaaatggcaaatatgtgtaaatagaaaataaatagattttctcatttttaagaatatctttgaaagtagattgactgtttaaataaaaataataaagtagtatgaggcttaaaacatgttagagtactggataatgtattatattataaagacaggcctggcccagtggctcatgcctgtaatcccaggactttgggaggccaaggcaggtggattgcttgagctcaggagttcaagaccagcctggacaacatgacaaaaccctgtctctacaaaaaattaactggcatggcatggtggcacatgcctgtagccccagctacttgggaggctaaggtgaaagtattgcttgagcccaggaggtcaaggctgcagctagccaagatcacaccgctgtactccaacctgggcaacagggtaagaccttgtctcaaaaaaaaaaaaaaaaaaaaggatgggatatgagacttatactataagtagaatggtataatatcatttgaaatagactgtattacattaaatatgtataatgtaaaactagggtcactacaaataaaaagatacagcatatatacatagagagaagagggagagagttgaagtcttgctctgtcatccacacttggagtgcagtggtgcgatcttggctccctgcaacttccgcctcctgggttcaagtgattctcctgcctcagcctccagagtagctgggattacaggcatgcatcaccacgcctggctaatttttgcatttttagtagagacggggtttcaccatgttggccaggctaggcttgaactcctgacctcgtggtctgtccactttggcctcccaaagtgctggaattacaggcgtgagctactgtgcccggccacatctaatatattaatagagggataaaatgaagtcctaaaaaataattagccagcaaaataaagtcaagaaaagaggaaaaaggaacagataacaaatagtagattcaaacctagccatattgataattacattaagtctaagtggcctaaacattccaattaaaagacagagattctcagattggattttattttattttattttttttgagatggagtctccctctatcacccaggctggagtgcagtggcacaatctcagctcactgcaacctccacctcatgggttcaagtgagtcccctgcctcagcctggagagtagctgagattacaggtgtacacgatcacatccagctaatttttgtatttttagtagagacagggtttcaccatgttggcaaggctactcttgaactcctgggctcaagtgatccgcctgccttggcctcccaaactgctgggattacaggtgtgtgccaccgcacctggccaacatttctttatgtgaatctctgtctcaaaatagtaaagtaagagacaggttaacccagataacatactgagttttttaattgaatcaatatccagtccagggcttcttattctgccctcacagccaagccatctcataccactgggacttcccagtatggcttccctgtctagaatgcccttctctcttttgtcctctggcaggctcctactcatccctcaaaacccagctctgaagttgccccctggggaagccctccccaaaccccatgtcttccctgtatcataaatatccctttcatggagttctcaaatactgcactatcattttattatttggtcttcagactttctacttcctgagggctgagcctacctctctcttcctggacagtgcctgggtcctgtgttttcacaggggtgtggagaggaccagcgcctcttctcattgtgatcacccatcaagctcaggtaaaaactgcgactttcttttctgttttctcagcctcaaagacaaaaatcaaggcgaactcatcccccctgtgctgaggttcacagtgacgtacctgagagagaaaggtgagacggggccggctccagctggatgacgtgagggctgctgggtgcacctctctgggtggtttgtcttggatcctgagcacccacaagccagggggtgtgaccaggaagggaggggctcaagcacagtggctccaggtctgggctctggcctcggatggtctgggtttgaatcctgtctcccctgtgtactagctgtgtgacctggggcagttaccctctctgggcctccattcccttgtctgtccagtggggttaataacaaaccgtacatgacttgtaggattgttgtaacccctaaacgagacagtgcctgcaaagcacttcgggcagtgctggtctgtaggaagccctctcgaaatggggactcctctgatgggatcaactttgatttgcagataccattgccagtagggtgggtgcagtcaagaacttggagtggggtgagccttgtgggctctccacagctcctgaggctagaactgaggtccatggagaaggtgcgtggaggctgcttttaccttaatgggaggaaagaggttcccacggaggagcaggcaccagggaggctttcctggcaccacagctgcaggtgtgctaggtgggccgggtggtctccagcctgggtgctgcagcgcagatgcgtgggtgtcagacaagaagtgagtgcccccccccatccccaccaccaaggcagggctggctcctctccagcctccagagctcggctcaacagttgcttcctcagggaatccccctaacatggccagaccccctaaagcagaccccagctctgcccacggactcagcaccgtgggccccgagaccccgccaccgtgtggtcccttggctgctgccgtttctcacatttccatctggcggggagttcccatgcaatagctcttaaagccaccgcctcagccctgcacctttctggttacgagtgggttgatttcctctttggagcaggccaggtgggtggtcttggaaaaacctgctttagacaggcggggcctggagagcccctcctcacttgtaggccagggtgcccaggaaatgtgctttggcacgagagtccatgcacatgggggtggcatcagtgagcagatgtgctgggcgggggcctgggagaccatctccctcaaaccccagaccctgcggccccagcatttccctcagtcacgatgctcagctggcaggtgagcaggtacggggggcaccccacactgggaccccaagaggcctgcctgtccccggcctggactgcccctccttgccctctaccggttaggtcctgctttccggaagccctctccaattctgcccctctcccaggcagaactgccttcttcacgcctccccatcattcactcattcacttgggaggcattcgctacgtgcctccctcgtgccagactctggggatatcaaagtgagcacacgggatggggaagcagcagctattccaccgagagctgcccagatgctgacttccatcagggagaaggccctgccagaccggggtccctgttaggggggttgaccttgttggggggcttccctgagggaggggcagtggagctgagctctgaggacggggagaagctggccatgccgtgtgacagaaaggccccagagaggagagcaggtgaaggggctcgtggctgtgggagtgcgggagcgtgcggggcttcgaggaagttgggaggagaaggggaggtcaggccttgcaagtcccaagaagacttgcacctccagatgcctgcgccacagtcctaggtcctggtgttccggggcacccccatcatgcaccgcaggccccccaagggcaggctcaggcctgtttctctttctggctctgaagccagcaggggcctggccagagggagcccttccctctaccccacagctgctttcatgagccaattacaagcactgaaaatgctctttataaactgacaatggagacaagttttcttctttgattacaatcacctctttagcagaattgcccaactgaacttggacatcatctatatcttcactgtctaaacagcagccaccagcccctgtggcagtagctcaatagggcagttcatatgaggctcatgcaattgagtgactagatttctaattttatttaattttaattaaagttaaatccccatgtgcagctactggctgctgtgctggacagctcagccctagctcttgtgggaagtcacgtgtctggacgtctcccaggtgccaggcacttgctgggcatcaccgtgtccagtcctctctgcagcccttggagacaggagctcatggccttattctgtagataaacaaggcagataggctcagagaggccgagagctttctctgaggtcacacagctggtaggcagagctggactagagcctaggtctgtctgagattagagtctatttccgctttccctttccatggaccacagaggtgggaaatcgggtgggttggggaatatggaaaggatttgaggaacaaataaatgtgtggaggccagccacaggtgggtgatgccgtgggcaggggagtgtcatataatgtcctggaagccctttgggctgggacctgtgagatgcctggaagctcctctcctgcaggcctgcgcaccgagggcctgttccggagatccgccagcgtgcagaccgtccgcgagatccagaggctctacaaccaaggtgagggtgtcccgcagtcctgagccccgagctgcctggtcagcgagcacagcgctccggggcctcagagcggaggcagggaagcaccgcccccgcaacccacccaactcccagaaaacactcagggtgggggcagcttcccaggaggcatcgaggggcccactggtagtccagagtggggaccttttgtccagacccccaaccccactgggacatggtggccgcatgatgccattttgcctttagggtctctccatccacaccacgtggcacgtgctttcaggagacaccctgcagtgcagggaagctggttttttttatctggcagctcccccgaattggctcagcacggcttccttaactgccatgtgtaacccgcaggcaggggcagtggcctctgagctgaggatgcattgcactgacgctaatgaaggcgctgtcttgctgacaagacttgccctcgctcccactcgctcccgtcatcagttgtgcattacacaatcatggagcatcaggtctgcacggggcccagctcaggcctgcctgtctcaggcccagggcctgcggtgtcatctctgccacagacctggcctcagagagctggcattgtagccgggagcaacagcatgccacagagaagccagcagcccaccccagtccccactgggagcccgggaggaggcagttagggtagtgtaggggctgatggggccagagcacacccatttctaggtggggacagcatcatccctaggacacatggctccagcatcaggtgcgtcccatccggacatctcacgccctgtgtctcagagctcgttctgcagcggcagtgcccaggccggggtgcagacctcagcagtgctgtgttgtgtgtgcagggaagcccgtgaactttgacgactacggggacattcacatccctgccgtgatcctgaagaccttcctgcgagagctgccccagccgcttctgaccttccaggcctacgagcagattctcgggatcacctgtgcgtagctgccctggcgcaggggtggggggcttggtcctcagatgctgtcccccagctactggcccagggtcaggctctggggtggccgaggtgacgtgtacccaccctcctcctgttgccatctggcactgcagggcaagagagggggttgttggggctgcccccaccatgcacagccagtccacactgtccaaaggcagaggaggtggggtcggtcagggttgtccaggccggtctctcaggcacagctgggccaggaggcagggtgatggggggctctctagatttggggctcatcatcctggtcaaagtcctgcctgtaaccgctcccaggccccagaccctcagctctctcatctagaaagggctctcggcatttctccccagatcattgtaggatgccaagcatatatcacaggaactgagcagctatagtgtctgatcctacaggcgctttgtgatgggtcaaatgctcagtgtggctgagcacagatgactcgtaaaaaactccgtaacagcatctcaaaacactggtgaatgctaaggaaagtgatgcctcgaaagaaccataaaacccctcaggccttcatctaagtcatcgaacaccgtcttttcaaatgggactacctccagcgccctcctttcttcttggagcactaacagtcgaaggggggagctgattttggtgtgaattctgaagcagctcggttaagatatcgtaaagacaaatcttgaatcttaaaatcaatgtttctaccccactgtgtattcaagaatcacatttgcccaaagggcagcctggcctttgtcctggcccctggggggtgacttctgaaccttgcactttcccaaggggcaggagttacctttgtcactcatcaggggccctgatggtttatggtaactcatggttatggtgtgactcaagataggggtgtaggggtggccattccagaaagaccaattacatggttagagggtgcgggctttgagtgatgtgagaccagcctgacctctggggagggcatggggctggagactgatttcagtctcaaggcgtcctgtcaaggtcgctggaccccaaactcccctcaaaggcaaatttacacccatttactcagcagtgctcctaagcgcctgccaaatgcaacgccctttctgagatggggaaggtctctcctacaccctggaagaccatgaaagatgttgagggctgactgactttggctagtggatgggaagcctgggagagttcagagccaggctgagcctcatggagacaaatttgatcatgcgcatagaggtacctatctggtggagacagaaggaggcactacattcagcagcatcctaccagccggggccagagcaggcaagatggacaatgctccatcacctgaatgcgccaggctgtgtcctagagagaagcttccagaagcctcccaacttcattagcccctgcagagggatgatgactccagcctctgtaggttcctgcttgagaaaactcaatgctgccaggcgaacttactgtttgttccagccaaaacctggtgacagggagataggccctggaacccctctttgagcagcagttcctttagaaagcttgcaattgtgggccaggcatggtggctcacacctgtaatcccagcactttgagaggctgagttgggtggatcacttgtcataggagttcaagaccagcctggtcaacatggcaaaaccctgtctctactaaaatacaaaaattagccaagcgtggtggtgcacgcctgtaatcccagctactcaggaggctgaggcaggagaatgacttgaacccaggaggcagaggttgtagtgagccaggatcgtgccattgcactgcagcctaggtgacagaacaagactccatctcaaaaaaaaaaaaaaaaaaagcttgcaattatgaatcctttatctgtcctttgagatgaaaatcatctaccacccagagctatgtcaaggacctgagagccatctctttgaaatgaaaacattcaaagtgctacctctgcctcccagtccccggggagggaaggacccagctctggcttgcaccactgcctccggtcataaagataccagacatttgtccacttccggataggcaccaattaacaaacctggagagcgtagtcatattaagcaaccctctgttgggaaggaaaaaatcctttcctgctacccgtcttaggttcattggtgggaaccctgtaacttgttattctgacaaaagacagattcacacgagaaaagcatgccagtttatttaatgtaagttttacatgacacaggagccttttaaatatttatttatttatttatttatttatttaatttttgagacagtgtctcgctctgtcgcccaggctggagtgccgtggcataatctcggcacactgcaacctccacctgacatgggaacctttatgaaaatgaagaaaatgaagacccaggctgggcatggtggctcatgcctgtaatcccagcactttgggaggccaaggcagaaagatcacttgagtccaagagtttgagtccaagagtttgagtccagcctgggaaacatagtgagaccccatctctacaaaagattttaaaaattggctgggcttggtagtgtatgcctgtagtcccagctgctcaggaggctgaggtgggagatcacctgagcctgggagttggaggctacagtgagccatgatcacaccactgtactccagcctggacaaaagagcaagaccatgtccccaaaacagaaggaatgatggagggagggagggaggaaagcaagcaagaaagaaaagaaataaagaaaatgggccgggtgcagtggctcactcctgtaaactcagcacttcgggaagccaaggtgggtggatcacctgaggtcaggagtttgagatcagcctggccaacatggtgaaaccccgtctccactaaaaatacaaaaattagctgggcgtggtggtggacacctgtaatcctagctactcaggaggctgaggcacgagaactgctttgaacccaggaggcagaggttgtagtgagccgagatcgcactgctgcactccagcctgggcgacagagtgagactttgtcaaaaaaaaaaaaaaaaaaaaaaaaaaaaggaagggaggaaggaaggtgaaggaaggtgaagacatggttcagcccgaatgttttgatactaggtttggtgaagagtggaaagtcatggagcttcaattccttttgtcattccgccgtctttagagataaggcaccctctggacatagggaagaccccctcccattagaaggttttatgatctgctacacagaagtagggggagtcagagagagcccttcccacacctgcctttcttagattccttcagctcaataacatattcagcatgcccaggctccatatttgggacagtagtgttccggaccccagcattcccccatctggaactttccccaggaagttttacagtccagaaactgagttggtagattgtctcatgttgcatgaatccttctctcagtgctgtgactaggtcactccagggaaagagttgtgtctcaattcaggaggtagcggtggaggtgggagtagggtgactacctaagtcagcctgttaataaggggcctttctttgtcaacaaacatgaagttcagtggtttgaacaaaccataagttccggggattttttttattttgttttttgtttgtttgttttgtttttgaggtgaagtctcactctcactcaggctggagtgcagtggcacgatctcggctcagtgcaacctccacctcccaggttcaagcctttctcctgccccagcctgccgagtagctgggacgacaggcccgtgtcaccacgcctggctaattttttgtatttttagtagagacagcatttcactgtgtcagccaggatggtctcaatctcctgaccttgtgatccgcccacctcagcctcccaaagtgctgggattacaggcatgagccaccgtgtccggcctaaactccatttttttagtcaggagaacatttagttgagaagattcctagatgttggcttgaagtatcctttcatggtagagagagagtggcagcagctggccagtgaattccatagtttgcaatttagatgtctttggtgatggcactgggtgttccggtgaactttctgagcagactgagtaggaggcacaaggactatccgtacatcatctgctgtgatttctctgaagtttatatcaagtcttccagcgtcagcttttggggctttggggaaatggcaggttttagttctttgtcatgccaactcagggggtaggagaaaactggaaatgttagcttggagcgtcgtagccagatattggaggaaaggagaggaactgagaacccgcaagcgtgcgccgtagttttccacgggagcatcatttctctgtaccgttgcttctctcttgattctcagttacaaaataagtctggtttcattagaatttggcctgattatttacataagggcagcaagaatgggaattgacctatgtcggctctttttaagtctaccttgctagaacttttaataaggaatctcagattcactttttaaaagcctcttgaggctagaaagccaagttaaaaatttgccatcagggccagctgcggtggttcacgcctgtaatcctagcactttgggagaccaaggcgggtggatcacctgaggttgggagtttgagaccagtctgaccaacatggagaaatcccatctctactaaaaatacagaattagccaggcatggtggcatgcacctgtaatcccagctactcgggaggctgaggcaggaggatcgcttgaacccgggaggcagaggttgcagtgagctgagatctcaccattgcactccagcctgggacacagcgagactctgtctcaaaaaaaaaaaaaaaaaaaaaaaaaaaaaaaaaaaaaaccatcagactttgcctgcagtatctgtagatttgagagaattcctctcttctcaaggttctcaatatattttaagtttcctgggcctgccaggaagcggccttgcttactcactgtaacgtcatacataacactgaataaggctagttgtcatttcaaggaattccccttgtatctttttttttttttttttgagacggagtcttgctttgttgcccaggttggagtgcagtggcctgatcttggctcattacaacttctgcctcctgggctcaagtgatccatctgcctcagcctccggagtagctgggattacaggtgtgcgccgccacacccagctaattgtatttttagtagagacgggcttcaccatgttgcccaggctagtcttgaactcctgacctcaaatgatccacccacctcaacctcctaaagtgctgggattataggcatgagccaccatgccaggcccttgttatgcatttttaaccctacttcactagtaagcccaactacataaagatgtatgcttggattatacttaatatgggtaactcagaagatgcagctggtttttttgttttgtttttgtgttgagatggagtctcgctctgttgcccaggctggagtgcaatggcaccatctcagctcactgcaacctctggctcctgggttcaagcaattctcccacctcagcctcccgagtagctgggattacaggcaccggccatcttgcctggctgatttttgtattgttgtagagacggggtttcaccatgttgccatgttggccaggcttgtcttgagctcctgacctcaggtgatctgcccgccttggcctcccgaagtgctgggattacaggcgtgagccaccgtgcccaacctatacagctgtttttaataaactaacaatatcagactaatcttgtcagagttactcaagtcacaagaacttgaaaagaatgtttggcttagtttctatatttctgagagctttagaaatgttttatataaatgctcatgtatctctaagccaatttgaatagaactcctttaagggattttataaattaacttggtaataccatcagagggagaataatttcacgtatacataacatacatgcgtagacataacatagatctgcaaagaaaaaaagaatttttttttaagacagggtctccttctccttgacctctgggctcaagcaatcctcccacctcagcctcccaagtagctgaggcatgcactaccacacccagctaatttttaaatatttttttgtaaagacagggtctcaccatgttgcccaggctggtttcaaactcctgggctcaagtgatctccccacctcagcctcccaaagtgctgggatgacaggcatgagccactatgcctggccacaaaccaagatcttataactttcatacatagtttcatacaagttaagattacctgttgagggtgaaagttgttatcagtatttcaggagaaggccctaaagatttttttctttggccagtttgtttccaaatagtccttttaaccttgttttttgttttgttttgttttgttgtttttaaccaaaggtgtacctaatccaatgtaactcgaaacccataagactttttgtggccatggatacaagagatgttctcagagtcccccaggatccaaagttaccccacagatagccaaaagaaagacaagcgccctcagagctggtgatggctggtaggatgtcagctgtcgccgagtctgtgttgctatgaagaaatacctgaggctgggtaatttataaagaagtttaattggctcatgtttctgtaggctttataggaagcacggtgttggcatctgcttggcttccagggaggcctcaggaagctttcaattatgacggagggcaaaggaggagcaggtgtctcacgcagtgcgagtgggagcaagatggggtgaggtcatgccacacacttaaccagatctcttgagaaatcactcactctcatgagaacagcaccaaagagatggtgctaaccatttatgagaaatctgtccccatgatttaatcacccgtcacccatccccacctcccacattggggattacatttcaatgtgaggtttacaggcaacatcatccaacatatcagagtgcagctcacattactgtctggccagctataaattccctttttttttttttttttttttttttttttttttttgagacaaagtctcactctgttgcccaggccagagtgcagtggctgagattctctactcactacaacctctgcctcccgggttcaagtgattgtcctgcctcaggctcccaagtatctgggattacaggcacccgccaccacgcctggctaatttttgtatttttagtagagacggggtttcaccgtgttggccaggctggtcttgaactcctgatctcaggtgatccatccgtctcggccttccaaagtgctgggattaaaggcgtgagccaccgcgcccggcctgtaaattcttggggctacatcctgaccattggctgttcccccaggcatttggaagccaaactggccataaaggcaagttctcaggacacaaaacaagacgaaaggagaatcgtatcccatgattctcctcttcacaacaaaggacccaagagacagagacaaaggcaaacagtgactcttcctgggaggctgaagatcaccgaggactcctcgagatcagatgcgctgaagtcaaaaccaaagaacccattcttccgaatgtggctctgctggtccaaattcagaaaggaagaaaacaaagagactttgaccaccctcacacagtcgcgctgcagacagaaatctgggaggctgacttgagtaagaattctttttttttttttgagacggagttttgctcttgtcgcaaaggctggagtgcaatggtgcaatctcggctcactgcaacctctgcctcccgggttcaaatgactctgttgcctcagcctcccaagtagctgggattacaggtgcccaccaccacacccggctaattttgtatttttagtagagatggggtttctgcatgttggtcaggctggtctcaaactcctgacctcaggtgattcacccacctcggcctctgaaagtgctggtattataggtgtgagccaccacgaccagtcttgagtaagaattctttcttttggccggctctaccaggggtcctggctctctgtgcagctcccagaccaagtgaggtgttccagccaagggtacctcatccccatgactagaaactgcagggagggtcaaaatcttttccttctccccatcttaggttccttggtgggggccctgttgcttggactaacaaaagacagattcacaagagaaaaacataccagtttatttactagaagttgcacatgacatgggtaccttcgtaaggaaacgaaggcccagagatccagtccactgagtgtgctgatgccaggttggaagaagagtggagaggcgtgggaagtgcgacggacaggggagtgagcctggggcaggaaactagggggacatgccatcttcagagatgagtttgccccttccctctgggtatagggaaggcgcctctcataggatgatctcatggcctgctccagaggagaaaggggaggtcagagagtcctcgaggcccagcctcccacatgcaagctgtgtgacctcgggctagtcacctaacctctcagagctctctttcctcctctctctacactggggtggttgaaatgcttgacctcttgctccctcatagggagtgctcagtgacattggcggttgtgacgctcagctcaccagtcctgcctacttgccagcaggtattctcagagggaccacagagctgagggtgacctgcaccagtacccacttgggaccataattcgtagataaggttcaggcacaacacccagagaaggaaatggcagccacctggctcggttgaaatactcatttcaagggaattccttgtccattcaaatgactgaacaacagcttgatttcatggaataatggcttttattaagaagccaacaggaatgatcatagtggggagtcttgtgtcctggcagtgggtgtttgtagagcacccggtggtcaccagcaactctgtgcaaggctcagtgggagggtgattggtgtgttggaggatgtgggtacacagtagcataggcatgcatgtggctgagtgcacacatgtgcatacatgttcacacatgcacccgcagcgggaacttggtgaatacttgttggttggtggtggtttttttttttttttgagatggagtttcactcttgttgcccaggctggagtgcaatggcaccatctcggctcagtgcagcctctgtcttctgagttcaagcaattctccagcttcagcctcccatgtagctctgggattacaggtgtgtgccaccatacccggcttttttttttttttttttaagtaacagggtttcaccatgttgggtcaggctggtctcgcactcctgacctcaagtgatgtgcctgcctcggcctcccaaagtgttgggattacaggcatgagccactgtgcctggctggttggtgggttttgactggaaggctatggagctccagtggtagatgtggttataagggtaactggggggtctcagagtgggggccagttgcatcaggcccctggagggtgggacactgcctttccaagagcaacaaagtgtgggcgatttgtggtgctgagaatcctgagcaggcagttcgtctagagcagggttgcaaactttttctgtaaaaggccagatagtaaatatgttaggctttgtgggccttgtagtctctgttgcaactactcagctctgccctgatgaggcaaaagcagccacaggcaatgtacaaaatgtccgtggctgtgttccaagaaaacgttattggcaaaaacaggcagtgggccagatctaagccatgggccgtagtttgccaacccctggtctagaccactcccatttataaagtgattcggctttagcagcttcctggaaggtggtgctgctggctgataaagcagagggatggagcttgtagaattcaggtgatgatagggcttggatctgagtccccagcgcgtctcatgttgaattgaaactttggaggtggggactggtggcaggtgattggatcatgagggcagatacctcatgggttggtgctgtcctcgagatagtgagttcttaccagatctggtttaaaagcatgtggcacctctgtcccactctctcttgctcctgtttttgccacgtgatgcacctccttcctttttgccttctgccataattggaagcctcctgaggcttctccagaagctgaacaggtgctggtgccatgcttgtacagcctgtagaaccatgagccagttaaacctcttttcttataaataaccccatctcagcaagaatagccaaacacacaggtttgctgagcagagccatacggccagaagataagtgggggtcccaagcccaaatgtgggatagtccatcctcagagctgtccttcctacacccctgttctcctcccgggccgggatgcagcgctgcccctggcccctctggagctcagcagggagccccatgcccttccaggtgtggagagcagcctgcgtgtcactggctgccgccagatcttacggagcctcccagagcacaactacgtcgtcctccgctacctcatgggcttcctgcatgcggtgagtggggaaggggggagcttggggtgaagcccagtggccttccctcccatgctgggcccgcatggaccagtcccctccttgccctgggtctggggtcatgccctgcttgggcctcggaataccactccctgccccccaaggacctcatccaaggcctggtcaggcacccatgctgctgcggacctcctgcctgtcagacagggcgtacctgcccctgcctgctcctgtacctgctgtccctcagccattgccagtgacttttgttattggggtcctctgcccccatgtcatttcctgcttgggctgagtctctaggaggtgggagctgtgtccaccactggtacagagcccagtggactgagctgaccattcctggggaagggatacacccagaaccacgtacattaagttcctgtgactgcatcgtgggtgccttaaaacagatttactgtgtcactcttctagaggctagcagtccaaaagcaaggtgtggcgggctgtgctccttccagaggctctagggaaggttccccttcctggcctctcccagctcctggtcactccagctatgcctccagctcccccctggcctttgtctgtgtgtgtgtctaatctccctccacctttccctcctaagtgtggaccccctgccatatgtcactgggtttaggacccacccagatgacgcgggatgatctcatcttgagatcctcaacgacagctgcaacggccctcgttccaaataaggtcacagtcagattctctgtggtctatcttagaggggccaccattcaatctactacacaccaggctaagcaaatgaccagagagagagaaacccttcagtgctctgggcctgggcttagtgtgctctccccctggggcagggatccatttggagcaaaaacctgtgcagccaacaggggaaggttcaacacatccacgtgggtccacccccaacccccagacccacggccttgaatgtttaaccccctccatctctccaggccttcgccccaggctgtgcagggtgaggagagcctgagcagagtaggcgtcacatcccagagtctgttggagaatgtcacttcttggttttacaacaattttttttctccctgttgcttgacataatttctcagaggcccaaaactaaactctcctaattctctcaaaaaaattttttgagacagtcttgctctgttgccctagctggtgtgcactggtgcaatctcagctcactgcaaccccagcctcccacgtagctgggattacaggtgagaaccaccatgcccggctaatttttgtttttttagtagagatggggtttcgtcacattggccaggctgatcttgaactcctgacctcaggtgatccacctgcctcggcctcttaagagtgctgggattacaggtgtgagccactgcacccagcctacttctttttcattaggagagactgatttctctctctagccgccacctccatgggcaccgatgtgaatgcacctggtggggtgtggtgttgcgtgttatcaccccagtggcacctgggggcctcggcttgaggaggggtggcctgcagtgggcctggctggtgcacacctgcaacgggcttgggggaccggcagccagggggagcctgaaaggcatccagccatctcacctgagcatcctcaacagatctgtgagggtggtgcctggccctgcctccctccagttctctgctctgccctggtactcaccgcctcatgacccctgtttctgactgaggttccccccagcttgaatcttgtagggaggcaaggagcagagaacaggccctgccctcacgttggtccacatggccccctgccactggctggccacatgaccttgggcaagtctcctgtaccttccaggccccagattcctcatctgtaagatggggagtaatgactcccccgtgctggggttgcacgtgttggcggagatggacaaggagccccttctagcaggcaagctctttccactctccctgcccctcgtagtggcccctagatgtgctggctggtccccatcatgcccagttcgccactcacagagccgaggccagagaggtcaccaagttcgtaccgtctgtgctacagcccatccccaagattgcatctccccagaaggtgcagtggaagaggagatagtggggggttgaggctgtcacagaaggtcagagccagagggtcctccaggacatggaggccaagccttccttttagagatagggtaactaaggccctgagtgggcaggtggctgcacagggtccccattactggctgccggctcccagtccagtgctcctctcactacacctacgcctctccctaagttcgggagggagttccaggtgcccgtgccccttggtgttcactcccctttacttgtgtgtggtttcctccaggtgtcccgggagagcatcttcaacaaaatgaacagctctaacctggcctgtgtcttcgggctgaatttgatctggccatcccagggggtctcctccctgagtgcccttgtgcccctgaacatgttcactgaactgctgatcgagtactatgaaaagatcttcagcaccccggaggcacctggggagcacggcctggcaccatgggaacaggggagcagggcagcccctttgcaggaggctgtgccacggacacaagccacgggcctcaccaagcctaccctacctccgagtcccctgatggcagccagaagacgtctctagtgttgcgaacactctgtatatttcgagctacctcccacacctgtctgtgcacttgtatgttttgtaaacttggcatctgtaaaaataaccagccattagatgaattcagaaccttctaatgaaaactccatgcctctggtccttggactcttgtccatggttcctgagctgtggaccgggatagaataatgcatttgttaggatggatgttttgaatcccaacccaatgtggtttaactgaaaacaggaatggagtggctaacggctgccaggtcctgctgctgccacactgctgtgtaacacaccacctaagcccagtcactgaaagttactgcccaggagtcagtgggtcagctgggtggttctattggtcttttgagggggtcacttacatgtcctggctgagctggctggcagctggggtgactctgttctcccccaggtgtcccaagtccttccaatggccaaacggggcacattcttacaacataggtccaggtgcacacacaagcgctattgcaagcagttttcatgctttgactggcgtcctgtatgctcacatctcattggccaaagcaagcctggtggccaaggccagggtcacagagggagggccctgcaaagggggtggatatggggagggtgaagaattgggcataaagcagccaagctgcccgagggctctggggtgcgacaggactctgcagtctcaggcaggctgactcttgggctggcaaaacgggccctgtatttccatcagatatggtagagaaggatacaacttcttagtgccacagtcccagcaaaaaagccccaggttcaccctgattggacaagcctaggtcacatgctcaccttagacccattgctgcagccagggaaggctctgattggcttaggcctgagtcttgtgccccacccagaccaggcagtgggggaggagtggcaggccgctgcaggggattacccacgagtcccacgctgccgtctccccagctcttgatgcagggagaagcgggggaggttctggggagcaaaggacaaaagtcccctctacagatcccccatggtggcccctccgtgcctgcttggggtgttgaccgagttgtgccgggacccccggtacgcgttaggatgcttgggggaatcactggcagccccaggccaaacccacacccagggctctcctctgaaacttagagggtgcggtctcctcgctggcctccctcttcacttgtgtgtcttcccattattcccctgcccctcatctgccgctgtgtgtgttctaccctgctggtgctcgctgtccttaagggaggggctcgtgtggctgctgagcgaccccccacgccctgccttcagaacatggatggtacagggtcacgggcatggggacagggatggggagggttgcagaatggccgttacaccccctggtaagcttcgtgccatcccagctggggatggagtccccaaatgacacccctcttctctgcccaagctcagaacctacctgagtcacacggtatattactgacggccaatgcctatgttctgcagcaatctcaatccttgcctcctcagaagaaagagttcgactggccgggcgcggtgactcacgcctgtaatcccagcactttaggaagccaaggcagttgcatcacctgaggtcaagagttcgagaccagcctggccaacatggtgaaaccccgtctctactaaaaatacaaaaaattagccaagtgtggtggagcacacctgtagtcccagctactcgggaggccgaggcaggagaatcgcttgaacccgggaggcagaggttgcagtgagccaagatcgtgccagggcattccagtctgggcaacagagtgagactccgtctcaaaaaaataaaaaagagagttcaactgaggggcataaggatgagtgagagaccgaggaccgaggcaagttttagagcaggagtgaaagtgtattaaaaaactttaaagcaggaacgaaaggaagaaaagtacccttggaagaagaccaagcgggcgacttgagagatcaagtgggtggtttgaccttcgacctagggtaggccgggcacagtggctcatgcctgtaatcccagcactttgggaggccaaggcaggtggatcacttgaggtccagagttcaagaccagcctggccaacatggtgaaaccttgtgtttacttgtctactcaaaatatgaaaattagccaggcaggggggcagtggggccagggggatgcccaagcccagtcactgaaagcaactgctggtcattactgcccatgagtcagtgggtcagctgggtggttctattggtcttttgaggggatggcttacatgtcctggctgagctggctgtcagccagggtgactctgttctcctgcaggtgtcccaaatcctccaacggctaaaaggggcacattcttacaacacaggtccaggcgcacacacaagcgctactgcaagcagttttcatgctttgactggtgtcctgcatgctcacatcccattggccaaagcaagcctggtggccgaggccagggtcacagtgggagggccctgcaaaggaggtggatagggggagggtgaagaattgggcataaaacagccaagctgcccgagggctctggggtgcgacaggactctgcagtctcaggcaggctgactcctcgggctggcaagatagaagcacagggcccatcaaatatggcggagaaggatacaacgtcttagtgccacattcccagcaaaaaagccccagattcgccctgattggacaagcctaggtcacatgctcaccttggacccattgctgcagccagggaaggctccgactggcttaagcctgagtcctgcgcccacctagacctggcagtgggggaggagtgacaggcctctgcgggagattacccgcaagtcccacgctgcggtctccccagctcttgctgcagggagaaatgggggaggttctggggagcagaggacaaaagtcccctcagcagcgtgggtacctgaccgggccttggatgaggtccttggtggccaggaagtagtattccgaggcccaagtagggcatgaccccagacccggggcaaggaggggactggtccatgcgggcccagcatggcagggaaggccactgggcttcaccccaagcgccccccttgcccactcaccgtgtgcaggaagcccatgaggtagcggaggacgacacagttgtgctccagtgccccgtaggatggggcggcagcgagtgacgcgcaggctgctctccacacctggaagggcatggggctccctgctgagctccagaggggccaggggcagcgctgcatcccggcccagggggaggacaggggcgtagggaggacagctctgaagatggactgactgtcccacagtcgggcttgagacccccacttaactttctggccgtgtgtctctgctcagcaaactttgtgtttggccgttcttgcattgctatgaagaaatacctgagatgcggtcatttataagaaaagaggtttaactggcttatggttctgcaagctatacaagcatgccactagcacctgttcaacttctggggaagcctcaggaggcttccaatcatggcagacggcaaaaaggaaggaggcgcatcacatggcaaaaacaggagcaagagagagtgtggggcagaggtgccacatgcttttaaaccagatctggtaagaactcactcactgtctagaggacagcaccaacccatgaggtatctgctctcatgatccaatcacctcccaccagtccccacctccaaccttgagggttccaattcaacatgagatgcgctggggactgagatccaagccctatcacctgaattctgcaagctccgtccctctgctttatcagccagcagcaccaccttccaggaagctgctaaagccgaatcactttataaatgggagtggtctagaccaggggttggcaaactacggcccatggcttagatctggcccactgcctgtttttgccaataaagttttcttggaacacagccacggacattttgtacattgcctgtggctgcttttgcctcatcagggcagagctgagtagttgcaacagagactacaaggcccacaaagcctaacatatttactatctggccttttacagaaaaagtttgcaaccctgctctagacgaactgcctgctcacgattctcagcaccacaaatcgcccacactttgttgctcttggaaaggcagtgtcccaccctccaggggcctgatgcaactggcccccactctgagacccccccccccagttacccttataaccacatctaccactggagctccatagccttccaatcaaaacccaccgagtagccaggcacagtggctcatgcctgtaatcccaacagttggggaggccgaggcaggcgcatcacttgaggtcaggagtttgagaccagcctgatccaacatggtgaaagcctgtctccacaaaaaaaaaagaaaaaaaaaatttatccaggtgtagtggcacacacctgtaatcccagctacttgggaggccgaagcaggagaattgcttgaactgggaagacaggttgcagtgagccaagatggcgccattgcactccagcctgggcaacaagagcaaaactccatctcaaaaaaaaaaaaaaacaaaaaaacacaccaaccaacaagtattcaccaagttcccgctgcaggtgcatgtatgaacacgtatgcacatgcatgcccatgctactgtatacccacatcctccaacacaccaaccaccctccgagacttgcacagagttgctggtgaacactgggtgctctacaaacacccactgccaagacacaagactccccactgtgatcattcctgttggcttcttaataaaagccattattccatgaaatcaagctgttgttcagtcatttgaatggacaaggaattcccttgaaatgaatatttcaaccgagcctggtggctgccatctccttcgtgcctgcatggggtgttgacctatcggtgcaccgcgggcacctcacactccagggcaagctggagagggttctgctttctcccaaccagcctccaactccgattctgtctgacgtccaggtggcagcaccatgcccctgaggcccggtcattcctttaccaatggcggggatgagtcgcgagggtgccagtctggtggggagccactagctgaatccattttccttctaggagagagggcggctcagtagcagctcggtgctggtgggcgctgagctggccctgccttcagaacatggatggtgcagggtcatgggcatggggacagagatagggagggttgcagagtggccgttacaccccctggtaagcctcgtgccatcccagctgcggatggagtccccaaatgacacccctcttctctgcccaagctgagaacctacctcagacacatggtatattactgaccacgaatccctatgttctgcagcaatctcaatccttacctcctcagaagaaagagttcgactggccgggctcggcgactcacgcctgtaatcccagcactttgggaggccaaggcgggtggattacctgaggtcaggagttcgagaccagcctggccaacatgatgaaaccctgtgtctactaaaaatacaaaaattagccaggtggggggcagggggacggggggcggcgggggtgggcacctgtagtcccagctacttgggaggcggaggcaggagaatcacttgaacctgggaggcggaggttgcagtgagacgagattgcgccactgtactccagcttgagtgacaagtgagactgtctcaagaaaaaaaaaggttttatgtgttggcaggcatctgaggtctgtgtgccttctcccgattcctcccttggggtgggctgtccgcatgcacagaggcccgccagcactttggaggggagcacgcacagtgtttaccggagctgtgtgcgtgctcgcctgggtgttttccccttacccgtcgagcgctcctgtagcaggacgagccgcagacaaaactcctcagacaccagactaaagaaggacgaggttttttatccagcctggaacgccgacagactcgcgtcttaagagccgacctcgccgaagacaccgttcctggcccttttaagggcttacaactctaaggggttccacgtgaacgggtcgtgatggattgagagcacgtgtggttagaggtcggggggtaatcttttaacctcaggccgggtcatcggtggcaccggctggtcttgccactgacttcattcctgttgtttttcaacgtttacttcctcctcctcttcagagacaggagacagtaagagaagtggcttctctcctcgttcccatgaggtcaaacacaagttaaattccaccattttgcctcctagtgctcgtgtgtgaactcgctcgcccaactcctgagatctttgtcgggggaagcttattaccatggcaccagcttcaggtgattctattcagaggctgcgttccctggttctggctgcaaacaattacaattatagagaaacagtaacaactgcctgccatcacgtggccacctgactctcctagtgggggtggggggagccctcccctgccccgctcccgtctgactagctactactgtaacaaattgagaaagcggtctttcaggaggcccacaggtggaaactgaagtttccctacagctgcccagaggccctgatctgtggatgagggcctttgctaactggtcactgtgattcagacggactcaccgcccggtcactggccctgcagacagctggctcttgaggactggcacagctaaccaggcctggcttcctctctggggagtgacagtcagaatattctctactcttcccatgggaggaggcatggggaggccaggaatattaatcctactggatgagtttctcctgtgaggacactggagtaggtctgtgtgccctctgatattctcattcctagtgtgcacatgagaatccagaggccccccacagaacagtaagagaacacacctgaagtcacacagctagtgagtggcagagctgggatttgaaccagggcaaccccatgtttttccacggagctgtgggagccaaagggagacacctgggccttgggcttcccatctatacagtgggttttgtttttcgtctgtttgttttgagacagagtctcgctctaacccccaggctggactgcagtggcacaatctcggctcactgcaaactccacctcctgggttcaagcgactctcctgcttcagcctcccaagtagctgggattacaaacacacaccaccatgcccagtgaatattttttattttagtatagatggggttccaccatgttgcccaggctggtctcaaactcctgagctcaggcaatccacccaactcggcctcccggagtgctaggattacaggcatgagccactgcacctggccctacaatgggtttttacactgcctactcccagctctgagaacgccagtcagagaccaaaaatcctgagctaggatcagccccaccttttgcagtgactcagcaagtttaatccacactgggttgtcagctgtcaccatcagcccacgtttaggcaggaaacagagatgcatggcggtgcccctggcagcctctgcactgaagtcctttgagaggctccaggtccctgctcaccccccaccagccctcatccagcttagagcaggaggactgcacctcatgccctcactgcttcagggctccagggagcaggactacaggcacccagccctgagccctatccttcggaggaaccaccagggcctgtgggcctcagtgaggctttctggactcctcttcccctttcccctcccggctccttcttccccactggtctcttgtccaatgcctggctacgccttcctcctcccttcattcatgtttttactccctcccgcaccttcaccatacatgatctgtttttctgttctttttagctctcactcctagctaacctaggccagaatgattcttttatgcatcttgaaagttgattattgttttatttcttttctactctgctacaaagtctttttttcctttttcttgaaatggagtttcactccatcgcccaggctggagtgcagtggtgcaatcttggcttactacaacctccgcctcccagattcaagtggttctcctgcctcagcatctctagtagctgggattacaggcgcccgccaccacgcctggcttttttttttttttttttgtaattttagtagagacggggtttcaccatgttggccaggctggtctcgaactcctgacctcaggtgatccacccacctcggcctcccaaagtgttgggattataggcgtaagccaccgcgcctggcctaaagcctttttcttttgattcactcattcattcttttttttaaaaactgcaaccttccagctctgaccaaacacatccaggcacaaggcacccagaccaggcctgagtgggatccccaagaatggctcgatttggagcccgaggcaatcagccacctgtctccctggccacagcctctggaaaagccacacctagcatctgcaccccctccccaggaaggtgtcttgtgctcacacaattcagaacaaccctaaaatggtctcagaattctgttgccagggaaaaaaaaaaaaactgaaataaaaatgatggctccctgaagagcccaccattgtgagcaccagaattaacaatgacattaaatcaaatctcatgcattatgcagagaggtttacagcaaaatgcacgtctgtgaaatatatgtttcaaatttcctgactccaagaggtggccccaagatgttctcctgtggcttctttgataacagtttccctgtcacaaacgttaattgtggaatcctagcttagcactgcgtggcctcatcacccttcccttgtatcaaagcacaatttcctgatcatttccacagcaaaagaaagtgattacagagataatgtggtggaagcacatcagcacatttcagcttaaaacaatgaaatgcggtgctgaaatgaggactccagggtgtctctattgacaggacgcacagaataaattgtccaaacattcacctttgcagtaacgacagagatttttaagtgactccagagattaggcgggctgcccagaacttgtaactgacatccacaatgaattattgaattctgttgaggcataaaagtctgtagcaaaccaagtagtcagtctaccctgaagaaggccagcctgctgtcactggaggggcaaagactgggcaccccacttctggtaccatttgcagctgtgtgaccattggcaagtcatttagcccaggacggggagttgaaagtcacaaggctcagcttgggtgtttgtcctacatggtgggcatatgacctgtgtaagttctctgagctttttctctttgtgtgatggggaaggtcagcatccaccctgcaataccctgtgtgctcccaagcacctgctttgtgccaggcagtgaaagtctcataattacagagaagagcacagtacatttcctgccctcaaagggcttcctcaatagctggggagaatgtaagaaagtaaatgcggccgggcgcggtggctcacgcttgtaatcccagcactttggaaggctgaggcgggcggatcacgaggtcaggagatcgagaccatcctggctaacacggtgaaaccctgtctctactaaaaatacaaaaaaattatccaggcgtgatggcgggcgcctgtagtcccagctacttgggaggctgaggcaggagaatggcgtgaacccaggaggcggaggttgcagtgagctgagattgcgccactgcactcccgcctgggccacagagcgagactccatctcaaaaaaaaaaaaaaaaaaaaaagaaagaaagtaaatgcgcaattaactgtttttaagaactaaagcagtatgtgcagggcacagggaggtgcaggataggagacagaagagacaagagagtcgtaaacacctcctggtttttggcttgagatatgtgggcaactaagggtgatcgtccctggaatggcaggagtatgggagaaagagcaggttctgctgttgattttttaaaatttattattttattattattatttttgagattgagtctcactctgtcacccaggctggagtgcagtggtgcaatctctgttcactgcagcccttttgggttcaagcgattctcctacctcagcctccctagtagctggaattacaggcacacaccactatgcctgggtaattctcgtatttttagtagagacagggtttcaccacgttggccaggctgggctcaaactcctgacctcaagtgatcttcctgtctcagcctcccaaagtgctgggattacaggcgtgagccactgtgcccagcctctctgctgttgatttgatatcaaaaagctttacttttttgttagaataacaataacttactgtttaggggaaaaaagaaaaaaaaaaaaaaacaatgacagaaggtatacaagctgtgcctgtagtcccagctcctttggaggctgaaatgggaggactgcttgagtccaggaggttgatgctgcaatgagccgagatcatgatcatgccactgaactccagcctgggtgacagtgagaccctgtcttaaaaacaacacacacacacacacacacacacacacacacacacacacacgccaagaaaagaaaaatcacttgaaatgtgactatctatgaatcctattcttaatattttgagaaatgggcactctcgtatactgctggtcacaatgcaaatagtacagtcactttagagagcgatttagcaagctggtgaagttcaagcattgttaagtctagataataaccaagaaagtaggtataataacatcaccgcagcacggctgtcagagaaaataattagatgcagcctaaatatccatcagtagcagaaatgacaaataaattgggtgatgtattcacaagattgaagagtgtcctgcagttaaactgaacaaaataggagtgaatttatcaatatagatagatctcaaaatattgcattaggaaggaaaaaagctacagaacaataaagatagcatggcatcatatgtgtaaaaattttaagctaccaagacaatcctatatgttgttcatggattgaataatattatatacattgacatatatacacacacacacacacacacacaatgtcctatatatatacacatgacctatacatatatatatatatatatatgtgtatatatatatacaagaagaatttttaaaaagtagctgggaaggagatataccaaactcttcatagaagaaaggaacaagagggtctttacctacagctatatatttaaaaaatttaatattagggcttacagtatcaaccttaagtaaactgaaaggtaatgatgtatattatgatgcaaggatcaactaccaaaaaataatgtaaaaagatatagctggctgggtgtggtggctcacgcctataatcccagcactttgggaggccaaggtcggcagatcacctgaggtcaggagttttgagaccaacgtggccaacatggtgaaaccccgtctctacaaaaatacaaaaattagctgggcatgatggtgggtgcctgtaatcccagctacttgggaggctgaggcaggagactcgcttgaacccgggaggcggaagttgcagtgagccacgatcgctagtgcactccagcatgggcgacggagacagactctgtctcaaacaaacaaaagaagatatagctaacaaaaaaattaaaagtgaattattaaaaatattttttaggctgggcgtggtggctcatgcctgtaatcctagctctttgggaggccgaggcgggtggatcacgaggtcaggagatcaagaccatactggccaacatggtgaaaccccatctctactaaaaatacaaaaattagccaggcgtggtggtgcacacctgtagtcccagctactcgggaggctgacgcagaagaattgcttgaacctgggaggcagaggttgcagtgagccaagatcgcaccattgcactccagcctggcgacagagcaagactccatctcaaaaaaaaaaaaaaaaatttaaaccaaaaaaagccaagataaacagtggaacaagaaaccaaatgggacaaacaggaaacaaataataaagttaccaactgcatcaataattatctctaatattcatggactaaactttaaaattaaggggcagatgtcaaaatggatataaaagcaagaactaactacattcactttaaatatagacaggttgaaggtacatgaatacaaaaaatataccatgcacgcagtaggcatcaggagtgtggggtgtctatattaaccttagataaaataaacttcaagacaaaaagtattatcatttagagagggtcttctgatactgatacaatggtcaatttattcagaagatgtaactatcaaatgtaaatgcacctagtatatagaacttcaaatacaggaagaaaaaaaaacacaagataatttaaaagatagacatttcataatcatagttggagactttagcatttctctcatcaactgaaagatcaacttgacagaaagtaaagtcacagataatctgaacaactatcaaccaccttgacctgattgatatttttataatgttacagccaacaacagaagaatacacattcttttcaaagtgcacatgatacagacatgaatactgaccacattctggaatacaaaacaagtctcaataaatttaaaggaattgaaatcacatgaagcctataatgaaataaaattgaaaataaaaataaatgatatttaggtttcttttttctttttgtaaaaaagaaaaagaaaccacacttctaaataattcacatgtcaaagaagatatcataatggatgtgagaaaataatttgaattcaaatccaaattaatttgaatatatgctaatgtgatatgtcaacatttctgtaacagttaaaacagtacctggagggaaatctaaatgcttatattaggaaaaaagaaaaaaagagaaaattctaaaatcaatgactagtgatgagtcatttttaagaaaaaaaatttatgtatcaaagtaaacccacacaagtagaaggaaggaaataataaataacagaaatcaacaacgacaataaaacagacagtagaggaaattaacaaagccaaaaattagttatttgaaaagataaacagaattcacaaacacatagctagatagatcaaaagaagtcagaaattaagaataaaaattatgactttagagtctacagatagtaaaataataagaaaatattatgatcagcaagatgacaaactccttgaataattcaacttagctgaaactgaatatctgaatagccttgtatattaaatacgctgaaaattttaatggaaaaaaaccttctcgtatgtaaaactcttggcacaaatggcttcgctggtgaattctaacaatagaaagatcttctttcagaaactagaacatttctaacttatttaacaccataacctgatgatgatttgcaaagaagtctatagttcaatatccctcatagacataaatatgaaaatacttaaatattagcaaatcaaataaagcaatatgaaaaagatactatatagtgaaccaagtaaagtttatttcaataattaaaggttggtttaacatttgaaaatcaatataaatcatatttccagaatacaggagatatgcatattgttttaaaaatggatataagtgtttgacaaaattttaaaaccatctgtgatttttaaaaaatcaaagcaaactaagaagggactttctatctactaattaatgtacttaatggtcaaattattgaaacattctccttacaaaatcagaaacaagacaagggtgcccagtctcacctcttccattccacattgtattggagatcctgactattgcaatatggcaagaaaactaataggcataaagattcgaaagagggaagtaaaactgacgctacttgcagacgacataattgtttagatggaaagtattacagggtttacaaaacaactactagaactaataagaggatgtggcaaggtttcaggatataaggtgtatcagtcagggttcactcaggaaacagaaaacacaataatttgaaaagggaaagtttagtgtaaacaaatcagtagctataacagggccataaatattagggtagaaactgatctctgaagagtacctttgggctacatgagagcatcctggggaggaacaatttggaaggggaagcccatccccaaagctgagattcagacctctttggagaaggagcagctgcaagccctctgggtgctgaggtttgcccagttggctgggctgggccggtccacagtcactcgcaagtagaaaacacgcctgtgggttgcaggtaccaatgctggtgagtgggcaagcagaggctttcagtaattaataaagtttgaaaacaccaataagccagctcccaagtacttaaggctcactcgggcctttctttagtgctagatgcttctttcatgagggaactggtacaattcctggagaggcctcttgctggcatgtcttgggtcatgtggcctgttcattaacaaatcaacttggctgggagatgtggtactcgtattgtaccatcatgggccatgtgcccctagaggggcacaggaggcaaacagggcagctccagatggctccagagagcagaagccccagggaagcaagtttcaggcaacccaaggaaagctgtctatgatgggtttgtcttagtcagtttctgctgctataacaaaataccacagactaaggctgggcacagtggctcacgcctgtaatcccagcactttgggagactgaggtgggcagatcacctgaggtcgggagttcaagaccagcctggccaacaaggcaaaaccccatctctactaaaaatacaaaaattagcccagcatgatggcaagcgcctgtcatcccagctactcaggcggctgaggcaggagaatcgcttgaacccgggaggcagaggttgcagtgagctgagatcgtgccactgcactccaccctgggcaacagagtgagactctgtctaaaaaaccaacaaacaaaaaacaaaaacaacacagactgggcaatttacacaggatagaaactgattttctcacagttctggaggctgggaagtccaagacgaaggcaccataggttggctgtgcggtgagggctgctctctgcttccaacagctcctccagaggggaagagcattgcgtcctcctcacccggctggaggcggaagggcagagagggatgaaatacctcgctcaagcccctcttgcaagggcaccaatcccattcatgaggaaggagccctcagggtctaatcacctcttcaaggccctgccacctaatactatcacacaggcaacagctggattttggaggggacacattcgaaccatagcagggttaagtcgtgtgccccagggttgaagtcctaacccccagtacaatgacccttatgcagtaatccccacttatctgcagtttcagttactcatggtcaactacagtccaaaaatattaaatggaaatttccagaaataaacaattcataagcagtgtcccgccctggataggaagcgtccctccgtccagctacctgctcatgagtcacttggccaccatctcattgatcagctcgaccattgcagtgtccctgtgtttgtgctcaagcaaccctcaccccctacttaacaatggcccccaagggatgctggcagttgggatctgccaaagagaagcttccttccatgctgaccgcctgccctggacagccagcccaccctgagctgggcaccctgctctccaggggccgtgttagatggagctgggagtgagggtcctggagtgaccgctgtcccaaactgaggcttgtctcagcacagggtcccctgggtgctgtggggtggggtgtgttgagctacaggcggcagatgtctgcacatcgtgggagcccccttctaatggcagagctgtccctgggagggagggagggagctgctgttgctggagtagaggggcagggcagtgaggggtgctttggagggaagtccctgcacggtccgggagctggaggtcacaggagctgcccctgagccctgctcttggttgggagtatggctgtgatggaaccgcatgggattggaggacaaggacggagtggagtccaggcacgtccactcggcacctgcaggatcgcaggcaattccatccctttcctggcctctgctttctcatctgcctgcccagcctcacctggcagttggggtggcctaagggactccccaggggagggccctgaaccaggatggcgcagccccaaggcctagcagctctgtctctccaaagtctatgctgggtgccaactgtttgccaggcacttctagatgctggggtttggaaagaaaaccaaccaaactccctatcttcctgagtagacagataaaaacccacaggggtgcacacagcaggctgtggaagctcaaggaaccaaagagcaggcagaaggacaggcaatgccagggtcctggcgagggggctggaaggcggcactgcgaggaggcggtgctcagggtcaggtcttcagggagatggctgggggccgagggcacagcacatgcaaaggccctgcggtgggagcaagcgaggaggcaggcaaggaggagaggagcagggcataaaccagaggccagagcaagcggggcctgtggccctggaggcacaagtaaggtgagtagggtgaggcctttagcttttgctgaacgagacacagggcagcagggttttgtttgttttttgagacggagtttcgctctttcgcccaggctggagtgcagcggtgtgatttcagctcactgcaacctccaccttccggtttcaagcgattctcctgcctcagcctcccaagtagctgggattacaggcgcccggatggcagggttttgacagcgtcgccatcacactagttgctgggttgagaagagactgcagcggggcagggtttggaaagagcaggtgggtggcagctgccggaatccaggggagatcatggggctgggaccaaggtgattttggggtgggcggtgaggcttgtcccatcctgcttatgtcctgagggcggagctgatggatttgccaaggaccaggtatgcaaggtgggagaaaagagccaagagtgactcccagggtgccagccccagcagcctgaagctcctctgagatggggaggtgggagggactggcctggtagagactgtgcagagcgtgagacacccgcagccgtacagtgggcctgggggtacagacagaagccaggggcaggtgaaggccggctgcgggagatctgaacacagacctgggccttcagtgattaggtagaagagaagcaagtctggagcagagaccagggagcagccacattggcaggagtgaggtcccaggagcctcctttggcagggggtgtggccaatgtgtcctctggttctgagaggtccaggtgatgaccgggagcaccccggggatctggccatgggaggtcactactgacctggtgttccagaggtgcaaaggggtggggagtcggactgaagagaatccaaagaggacaggagtgagccacggatgccgagtgtggtcttttgagtggcccccaggagggctcaggcagagctgacttgaaacctgctcccctcctcccaaactattctccccagggcaagccatgaagcgggactgtgtggcagccctgcatgccctccacctctctgtcccctggggcaccggaccccactttggcattagaccccagcctctggccacagctaactgcccaggggtcggccccgacccacttggccaatcagagtcccccgtgcaatgccaggagctaggactcaggggggctgattccccacctcttgtagggcaaggtgtaagctcagcgtggctgcaggagcgcctgtacccgctgctgggggagagagacagcggtgatgttgccaggctgagaggcaggaacccatgagggagcagagggcaccaccttgggctctgcacagtgacagacctgctgggtttccaagactttccaccctcaatcctagccctaaagggtcacccgccgcctctgaggactgggaatcgggggtgagtgagtggagggcactgagctctctccctgtttccctccctccatccctccctcctcaggatgggagaagaccctgatttccagcccctccaacgcccacctggctgccctgggcactcccgggggcctctccgcaacgcaaggacaccaaaaccacagggctttgaaatcatcgatcgagtttaatacattgtaaagaaggaaaactacattggcgtatttaagacaaacactttttctctatcctcactacccactggacggtcctccttggtccaaaaaaaacctaacaatctcaagacacatcggcagctacccctcccgggtccaacctttcagatcctcccattacactgttaaaacatgtaactcaatccatccgcgaagaaaaccaaaccaacagaaaaggaagctgaagacatggacatcgcaagccacgcggtaatgcatacttggcacagagtagccaatatagaagacgtgtgcctcacacggttcactttgttcatcaataaaagaatataaaaatcttgttcacccagtggtaagtgtattaaaatagatctgtatcatacagcacagtttctcccggagtcgtgagaatgacaggagggaccgtggcagctgcgggatttgccggcctcctcgctctgcacctctgcgtgtgtgcatgcgtgtctgtggtcgtggccgcgtgcgatgcacacacgcgtgttcagtgcaattcggcaccatgtgatatgctcggggtgggagcccgtggctcctggacgcttatcctgttgtgctgagtccctcaggactgggatgtgggaatcgggcaagggtgacaagctgccactgcccaccctggatgcagaagcccttggcagcaagtctggtccccgaaggccggaacctcccgagccaccgccctttctttcctccccaaccctccacccggctcgtaaaaaacctgccggatcttccagcttggccaggcttcccgaggggaggtgttcccatttgtaccttgaagcagagactactagaagcagaaaggaagtcagccagagtccccccaaccattcacattaaatatctcacaataaaaacgccatacaaaagtgtgaagttattttttggcatagtgtctgcactggcaagaagggaggagtggaatacttatcggctcttccaaaggagacaagaaagggcttcagtcgttaagttgaatgattcaaccccaaggagaaaacctgccaaatgctgccccccacaacagggttgcagctccactctgcccagaaactccatgagaaaaacgcatcaacggcaaactgagtccaagagattggcaaaaggaaggaggcagccttgaggaccccaaagacggagcaggaagggcacaggctctggcggggatcactgcagcgtcccggcgcccagatgctcacctccgacagtgtctttcaagttaaacagctgcaattcgtaaccctaataatactgacagaaaggggcccaggtggttctgcaaaggcgacggagtgccccaggcccgcccgcccaccccagggggacctcctaggagcgtggggcattgaggaactacctagatccactaccccgcttctcgtcccaactaccgctaccactcagctagtccatgtgttctcagctcgccctcccacaggacaccaataggcggtgccctcagtggagactgcgttctggggggcgtgcttgtcccctccacagcctcagcctgcccctccaacgggccagagggaggccgtggagagcagggcctggaagccagaggcccaggcagccccgaggtggccggggggagactgtgtgccccagcctgtcgtaccccacctggctcctaggtaccccctgtgaatttggagggcacagggccgcacccccacctggtcctggctctaggcctctcgcccagctcttcctccctcctctcctctgtctggttaatttttgtctgaaattcatagtgtttatgaattaaggccgacagaacccccaggctgtgtaagcagggtcccaataactttccgtgggtatgaagactggtccctcggggtcagttgtggccctgggggtgctggacggtggggtgtgtggctgccactgagggcttggtccagggcccggccagcagtggggcagggctagtggtcgtcatggtgacctggagcagctgctcgccctgtatcagtctcaggagggcccgcaggcggtccagggatgactgggtgcccctctggcgggccagcaggcttgtcttcaactccaggcatttctgttggggagaaggtcaggggaaagggtctcagtattcggctctacagccatcctggggcagccaccgtctgggcccctctcccctccactacaaaggcctacaagaaaccaggctgagggcttcacaaaaaccaggcagtggtgcaaatgcaattaaagagcagccagacccacaggagatgatgctcgctttggaacttagggctagaaaaagtgtggctctgcctgggaacgtccttcccatggctgtgatgtgacctcctcctccccgctagctgcccacactcttcctcctcctcctgctggccaaactgcagcagcctcggaggcctttggcttcccagtcgcctttctgctctttctctcgcctgttgtgctgtgtggtgctgcacaacacactgtctctctacgcaccaccgcaacaaggaaaagcagtaaggactgatgcctacagtcccatatccatctgctctgggtgaaatactgcttgggcaaataacaacctccccgagatggtttctaaaatgattatagggacaatcacaaagcctcttcacagcattatagagaggattaaatgagacactgcatttaaagagcttccccagggcccgctaccatcaccatcctctaacacatcaacaccaccatcatcaccattactgtgatcattaccaccatcaccaccaccatgatcaccattatcaccaccgccaccaccatcactgtgatcagcaccaccaccaccatcaccaccaccatgatcaccattatcaccaccgccaccaccatcactgtgatcagcaccatcaccatcatgatcaccattatcaccaccaccaccatcactgtgatcagcaccatcaccaccatcattaccaccatcaccaccacgatcaccaacgtcaccaccaccaccaccactgtgatcagcaccatcaccaccatcatcactaccaccatcaccaccaccatgatcaccattatcaccaccaccaccatcactgtgatcagcaccatcaccaccatcattagcaccatcaccaccacgatcaccaacgtcaccaccaccaccatcacggtgatgagcaccatcaccaccatcaccaccaccatgatcaccattatcaccaccaccaccatcacggtgatgagcaccatcaccaccatcaccaccaccatgatcaccatcgtcaccaccaccaccatcactgtgatcagcaccatcatcaccaccatcaccacaaccatgatcgccattatcaccatcactgtgatcagcaccatcaacaccaccatcaccataatcaccaccataatcaccattatcatcaccaccatcaccatcactgtggtctgcaccatcaccatcatcaccatcatcattacaaccatcaccatcaccaccatgatcaccatcaccaccaccatcactgtgatcagcaccaccatcattaccaccatcaccatcaccaccaccattacgaccaacaccatatcatcatcaccatcaccatcatcaccaccaccaccattatcatattcccatcaccactatcatcaccatcaccattactaccatcaccatcatcaccaccaccacaaccatcatcttcattatcttgtctatctccatcctatggaggaggaattacgttcactttacacaagaggaaacagattcggaggtcagggccctgccaaggggcctgagcaggcgcacagccagggtgctgtcaatcgcttgataaatatttgttgaatgagtcacagcgctgccttctccacatactggcttgctgggggatgcttggtgagtctgtcttcttcctaggccttacaggtgaacagtgaagctctgcatccacacctgtggttctaaggacacatctgcctgtccccaggccccggtgcacacctgcagggctgaggccagcctggatctacacttgtggtttgaatgacacgcctgcctgtccaccaggccctggctccttcctgcactgctgaggccagcctggatctacacctgtggttctaaggacacatctatctgtcccctagacccggggcacacctgcagggctgaggccagcctcccccaggccccggggcacacctgcactgctgacgccagccgccggtcccgctcctccagctgctggtgctcgttctgcagctcactgcctcgttgcagcagcttctgcttctcctcttctttgactagaaaagagaaggccaggtccctggagaggggcaggtaaggagcggctgggtcgtagagtaaatgggagaggcagaagggatgaaaccaaggcctaggacatccccctgaagaagccagtggctgtggccaaatgcacaggacctggagccactctcccctggccacacctgccccggacacaggaccggtcccaggatcccacttttcagtgctctggccctgaagggaatggacccacctgtcctcccacaggaccaggtgagcccagaggcctgggtgggggaggagggggagcaggtacccttttccactccccagggatgcctcacctgtcttgtgggtgacataagagtgcacgatggccagcatcccagtccagggcacaccctcgtctttctttaaggcctggggagcagacggggagatgaaaaagtggacaggccctgggacctgctgggactgtccacaccctggctgtgtaaccctgagggggcacgccctgtctgagccacagggtcctcacccgtgaccaggagctggggccgcacatgcctcatggcccagctcacaggggctacacagctccacgaggctggaacattctgggcctctcccctgctcatcaccagggccctgaacaggcagcaggctcaaatacttctcgaacgaacgaatgatcacctgtcttcctcccacgtccagaagacctgagggcagcgaccccaggcacgccagggacaaatggagagactcgatgtcccccacactatgctgaagtggggaacagaattctgttccctctccacatggcctcaaaaagttgtgacaaaaaagaaagaagaaaaaaggaagaagaggcaaaaaaaaaaaaaaaaaaaaaaaaaaaagctgggcattaatcccagcagtttgggaggccaaggtgggaggactgcttgaacccaggagttcgagatcagcctgggcaacaaagtgagacccaacctctacaaaaaattaaaaaattagctggccatggtggtgtgtacctgtggtcccagctcctcaggaggctgaggtgggaagattgtttgagccccgaaggtcaagactgcagtgagctgtgctcatgctcctgcactctagcctgtgaaacagagcaagaccctgtctaccaaaaaaaaaaaaggatgtaacccccgacccaggcagtcacaatgcaggggcaggtagccgcagagggaacagcccgacagcagcccctgcccaccatatccacagcctttgatccccacagaaccagggatgatgggaactcccaatggttaatactttttgaaataaagtattaaaactcccggcctgggtgcagtggctcatacctgtaatcccagcactctgggaggtcaaggcggacagatcacttgaggtcaggagtttgagaccagcctggccaacatggtgaaaccccatctctactaaaaatacaaaaaattagccaggagtggtggcgcatgcctgtaatcccagctacttgggaggctgaagcaggagaatcgcttgaacccagaaggcagaggtggcagtgagctgagatcatgccattgcactccagcttgggcaacaagagcgaaactccatctcaaaaaaaaaaaaaaaaaaagaaagaaagaaaggtaactccctatgaccacacaagtcatgcatctgtggaaggcacacttgaagccaagcactgctgccacccgccacccaccacactcaggggccacactcccaagcgttttctcccagggtttttactctgcagtttttctcagatggctgattcccaaactatatagcagctgtaaagcctgttttttatctttataattccatatagtgaacaagatccagagaatcacactttttgtaaaaacctgttggatgctggcggaatatctcactgagtgcagagctgggctattccactatctcccgctgctgggaggagaggctgcttcccctctagtcttgatcacctgaggtcaggagtttgagaccagcctggccaacatggtgaaaccccccatctactaaaaatacaaaaattatccgggtgtggtggtgggcgcctataaccccagctacttgagaggctgaggcaggaggatcacttgaacccaggaggcagaggttgcaatgacccgagactgtgccactgcactccagcctgggcaacagaacgagactctgtctcaaaaaaaaaaaaaaaaaaaaaatcccataatacacaggacaaagttcctcaaccaaggattatccagccccaaatgtcaattgtgctgaggttgaaaaagccttcctatacccaagccccttttttcacccctcctctgccctgtctctgcctacggtggggacctccatgccagtctggggtgagggggtcacacagcctcctgtaccttctgctggcacctggggcacacccacacgcccttgggcgccgtcttgaggggcggctccaggcagctgaggtggtaggcccccgggcaggtgccgcagggctgcaggttggcccctcgcttgcaggcggcacagtgctcatcgtgggtgatctcgttctggaagagaagggagggcaggagacaggtcagccacagccagggcagcgggggccggtcagccagggccaggcccaggcagctgtgtctgacctacatgtggccgctcttctgccaacgtttcccagcagctctacggagagagagggataaaccctggagggcgacagtgtggggtcaggcctgggccctgggaggagggggggcacccacagggccagatttactaggggctggggcactgagcattggagtctggcctggtgtgactcccataacctgattcttctgtgctaagacctggaccccaggtgcgggcgacaaggcaggctgtcctgctgcggcctagaaaacagccccctgagggtctgtgttgcaccagaggtccatgtgctgggagtgggaccagtgatgaatgcagcactccctccccgcccccactgcttatgtggacactgcctggaggggcggcgtagccccggccaagaccctgtactcggctctctgttcaccatccacgtgtcaacagcatgctccaacttcagagttggaaaagaccagagagctctcctctgggatggcccgtgccacaaggacactggatgtccctgaaggaggggcaacaccctcagaggaggcctcagaggtccctgtctccaccccttgtgtcatgcaaatgcccagggagggagaggcggttgtcacacagggagggggaggcagttatcacacagcaagctggagggggagccgggaccagcaaccaggtggcctgcctcaaagccgaggccctctccaagtctgtgggctctgtggggacagagctcaggctccaggtgtcccctgtccacatgcccgccctggatgggcacaagatgtttgcagataaacactgccaggccccccagcaccaacccgtgccattgcagggctattgtgaaaatgacacagcctaaccggagctgactgcaatcatcacctactgcttcttagaggcttgacagttacaagcatgcagggactagaatgttcttttagaattagatcagaaattcagtgaagaaaaacactgaataaattctgagatcatgccatgaacgaggtcatgaccagccaatgttctgggaatcagggatgtggtgtgtgcacgggtagggggtagggggtagggggtgggggccccacaggatcacagaaatgtgggtgtgtggggtgagtccctggggattaacaagtccagccccttttcggacgggtaacagaagaccagggagggccagctctgcccaggtcacactgaggccagtagagccagggtggaggcctttgggcaccagctggctgcttccagttgggcctcagtggcccctgcagtctctgcatcctcaattctgaggagggagggctcctgtttgaagctgagagcagagccctgtggcaatgcccgacttgacgctgcctggccggctggaaagctggctgagtgttgcacaaagctcttagcacctaaaggcagaaccgaaaggccttctgcaccactccgggctctttccctctttccaggagggaccctatgaggactgtactgaaaacattctccaccccggaagtgtgaagacggagggaggggacacgtaccttccagcaggggtcctcattggctagcacagggaagaagggcggagaacacgttagtggccgtcagaggagcacagatcaggactggagtccatgaggcctcatgtggcaagggctcttaccccagggcatgatgggagcatcataaggcccccatgatacctgggctctcaccccagggcatgatgggaatatcacaaggccctgtgatacctgggatcttaccccagggcatgatgggaatatcacaaggcccccatgacacctgggctcaccccagggcatgatgggaatatcacaaggcccccatgacacctgggctcaccccagggcatgatgggaatatcacaaggccctgtgatacctggggtctcactcctgggcaggatgggagtaaggatctcagccctggtcacagctaggagccaccatgggaacaggctcatgtggcccctgtgctgaggacatagtggcagtgagctgcccggggggaaggaaacatcactccaagaacccctcaaagtgacttattttcaactctttttaaactgtaatccactctcattctagtaaatgataccaaaccacacattttaatgatcgcaaacatatatatctttcaggttccagatcagatctgtctgcaaataatgccacccagcgggagaacagttccggagtctgcacagcactcgacagctcacaaagtgcagtcacactcgcccttcaagtcactgtcccagctctgagaagcaggtagctatgggcccactttccagatcagtaaaccaaggcccagggagggatggtgacatgttgaaagctacacagaatcccagcaagctggtcgtcatttcctgctcgtgggactatggttttctaactgaagagaactggcagcttcctgctgctgtctgaatgcaaggatgtggctccctgaggtcctgcactggggcacggctggcagaggagggaggggccctgcagacacaggtagaggcctgaggccaggttccagcctgaagatctggcccaatgccttgtacagaaggagccctcggctccaacacacacagcgaggcagaggcagaactgggctgagatccccacccctgtccagcctgtgctcttccaatgcccagagcaggcacaagagggtgggcaaggtgtgggctgagaggcgccagcccagcccaggggtatcagaggccgcccgcgtgtggggaagagaggttgtctccagtggagtatggaagcagcagcacctgggctgggtcacacctgcagaggccccatcggtcacgctcacacctatggcccaggctgtggacctctcccaggccacagctccaagctcacacacaggctgcaggaggagcggggaggtgggaggctcctctcagcacagcatcctcaccttcctctgcccaggtcagaccagtgggaggcgggcagccctgcccaggcccaggcgtggaggaccacccagggatgactccccgcggccctgagcagctctggcagaaggcctgaagccggtgcttacctctcgctgtgaggaacagggggttgttgagatagttggaggccagccgtttcctctgcagggacagaaaacaaaacaacacaccccatcatctggaggctctcttcgatggtgacgtcaccccaggtcaggactctctctgggacagggttcccacccagggctccaggctctggctggacaccccctgccaggggcagaaataggaacaaatacagggcagaagcacgcaggaatggctgaggatggggcggggcggggcagggaagtcggcaaaggctctgcctgcaggaggcctaggacaccctctctgcacccatgggtgcgtctagctcaggaagggccgtcagtgggacacatcagtcacatggtgcatgttacattctccacctgtctcctgcctctcaactgggtctggagtcaggtggaaaaatgggtgttatagactggctcccctaaattccacttcttggcatgtggcctgaaacatcacatgtggacaaaggtttctggaacattccagaagagcggccttagtcctggctttggcaaccacaggccacaccggtctaaaccttggtggttcaaagtggctttgactgcggctgttgtaatactgcgtggccagatttgacaccacttctctcggtgtggtcaggctgtggacctggggaagggccccctcgggctgtgtgcctgctccaggctcagggtcacggggccttgggttgactcctgacctgcttatgccgtctctggccctggcctcagacttgggagcctagagtaacgcctcgtccacacagcagcctgcattttcatgaacgaacaaatctaaaggaatgaagccctccctgtctggagaacacaccatttccttgggtggaggctgaaaacacctccacgatgttcttacgaagggtccgagtcaggggacagagcttgctcagatgaaggaagaggaagtgaatggtatgaaacggcccacgtggagcacgttctcagaacaggagcggggcaggcagaagtagaggaaaggcgtggacaggctgatgaggccagaggacgccccatggtgggctctccccacagacagggcaattgcagagcctggaactggctgccgctctgcgcgaaacgcctccctcccacttgagctcaggttcccaagacatggattctgggcagtggcccagactagcccgcaccctgggaggtgagacagcactttcctcaccttcctccagatctcacagagctggcatctgcaacacaccaggcactgacctcgggggacatcgtttccctcaggacagctgtcccaagctctggacttcggagctctaagcaaatggcttccatcccagagaaagactctaagacactgcccctaagaaagccctgagcctctgagctaatggtcccaacagaccctgcagagttggctttggggagatgacattaggattttaacctaagaattttggactgtcatttacaagggcaggaaggtgtcatttatgatctggtttctccctggggacatgctcatgggagaggcccttgtgctcccctatggcatccttaaatcccaaccctgctgcactggaccgattttggtgtaggctctcggattcccacccccatccctgggtatggacgctccaactgggagtagggaagggcactggccacgcccacccagcccctttctttacggtgcccgcctgctccaggctgtgcacatcctcagtctctcccagccatgagccaactgcacaggctctagacaaggtgtgaggtggtccagggaggccagggtgtccagccctgcctgtgaccggagatttgcctgatcattcagggtgaagaggcaagaagccggtgtacctcacacgaagccacgcccaccagagagcctctattaggaataaactgacatctcctcttccgcatcttcctatcaattgactgtcaactcggaggtgatgagagagatgatttacggtcaccccccagccccactcccaggagggacagacgaggggggtgcttaggaaagcgaatgagggaggccctgggacttttcctggaggctgtgcactgggagcccccaccctcctggtggcatggggctggcgggttccccacctcggtctccaggaggccgctgtaggcagggttggctgtgcttcttctcttccgctcctgtcgcttgctctggatttctggaaaggcacagacacagcagttactgggtcctgcctgccctgggaaccccaaatgcttccttgccaagccctgggcaccaccatcccctcctgctctgaagcctctctgtgtgctcagcatccatgccacagaatggcccagggtgggttagggcctccaggaatcactgactccatggcaggacagctctggtggcctcaggctgaatgacagattggtgggaggctggcaggtacccagaatccaggtgcccactcttagcacggggtcctccttttgtgtccctatctggcccatggccgttattggggacccacaggatggcagatacccacaggttgggtgatacccactggtccagtgagctgcagggtgaggctcccagctcccggaagcccaggagcaagcctctacccaggtggcctctgccccagtgcagcccccagcaggaatccttcgcatgcgagcgagagggggcatggccacactgacggtgttttcttttcctttttctttgctttgacccccaggcaggacccatgacctgcctctctgtgtgcagctgtgctagcgtcttctaatctctgtctcccggacctagttttgctttttaaaccttctcaatattactcagcctgttttctgtaaggcactcagaccttctgtggaataacacagggtctaaagaaagaaagaattaaggatatcacagcagaggttggggagaggtttctaaatgaggactatttataaaaccaataatgatcacgcctattaggaacgcacttttcgatcagtccctcaccaactccacgaagtttacaggcgcagttttccccatgttgcagatgagaaaactgaggttcggagtggggaaggaccttgcctagggactccggccagtgcacaggcgggacttgagcataagacttctgtccccacagccccatgctgcctctgtggcaccgtggtttcggtcagagattaaatcaatcccaaaggcaagctgagggcagcgggattcatctcgctcaagctcacaccatcaggcggggagctcacagaggttcttacaaaggaaccttggctggagggtaatgccttccaaccatgcacgcagaagggtgaggaaggccaggggcaagggttgcttacagggggcttccctgcccagggatctggaaggctggggctcttccctggctctccccatcctggctgctgccagagagcaagtcagacccaggggacataaagggagagggctgtcttctcggagcctgcatggcaggctgctgtccccgcgcgctgggctctgctgagctcaggaaggcttgccctgctcccacttgccccggatgagctgtgtgacctcagccaggtccctcccctcccctgggcttcggtggctcacctgctgcaatggatagaaactcttaacttcaagactgctagtgcctcgggcaccgcgggggttcacttcattccctcttgctttgaagaagaggaacgctaggcgaaccttcccgcatccaggtttaccagggtatgtgctttccctttataaaacgcctttgcaggtgaggtgggtgtggtggaatacgttctgggttgggagtcaggaggcctggattccagcctgggcctggtatcaactggccctgggaccctgggcaagtgaatcagcttccctggcctcagcttccccatgggggcttccccaagggggctggtttcgaggcttcccaggccctaagattctaggatgacgttcacagctcacgtgagattgccctcatcattctacgatgatgttcacggcccatgtgaagctgccctcatccgtaaggtcacacagccccttcgtagagtcacagtgccctgtctgctcaaataaactactgttccaattttcacggacacatttggtggcacacatgaagtccgcaggctagtatgacggcaggggagctggtggtcagctctcccactgtgctgggcactgcttccaacaatccccagaggacagttcggccattacccattttatacatgaagagactgaggcatacagaagtaacctgcccacacttaagaaagtggtgggaccgggcagtctgcctcttgtcatttccctgtgttgagagcagggagcccacacggtccctccgctgaaacaaggaagtgccacagtgggtattgtgcatagtcatggagccagggcgagtctggaaggcttctctgtcttgttcgtctttgatgacagccacccagcctcaggcacttggggcagacctcctgcgaggtggtttatacacagacactgccatccgagccgggacatcctgagacccactgcagcagtgtgaggccacgctccacccatatcggctgctgctgaagcccagaccacccatcatcacacctggcccccaacaccccggctttcgggtcagtcccagcccaacctgctgctacctggatccttccttaccttccaaatgttccgtggtaaccaggcctagcgctaccatgaaggcgattttctgagggaaggaacagacaaaggagcattaacacaaccgtcaaagttcattcatgcactcaacaaacatctgctgtggcaggtgcagggcgatacctcatgggtgccctaaccacagaggcctccaactccagatgccaagtcagtttctaagaaacgtggggaaataggatttccaaagagagtatctacagctcaatttggagggcctccttgaaaacactggatacgtgtattcaaacatactttaaggggctaaggtgcacatagctgggctaatccttatgggtgccccaaccactaaggcccctaactccagacaccaagtcagtttctaagaaacacagggaaataggattcccaaagaaagcatctacagctcgatttggaggggctccttgaaaacactggatacacgtattcaaatatactttaaagagctaaggtgcacacagctgggctaatcaatgtcacataacacgtcactggttcataacacatttgcatcattggtcctttcatggctgtccttcattttatttaataataaattgaacatcatgaacctactaataaactcaaaacctgacacttgacccataagttgcatctcttctgtgttcctcactttatctcattcttttcaccctcatttctagtgatcctagttttgtaatgaccatttctccagttttgtaatgaccttctccagttttgtaatgaccatttctttgactttgtatacatatgcatgtatttctgtcacttatgaaacagggtggcacttagttttatctgttttttttttttttttgagacaggttctcactctgtcacccagactggagtgcactggagtaatcacagctcactgcagcttcaatctctggggttcaagtgatcctcctacctcagcctcccgaggagctgggaccacaggtgcgcaccaccgtgcccagctaattttcgtattttttgaagagatggagttttgccatgttgcccaggctggtcttgaactcctgggtgcaggcctaccccagcctcccaaagtgctggtattatagacgtgggccaccatgcccagccattacctgtttttgacttgtgaaaaggtcatgacactgtattgtctacagagctcactagggcatttttttttcatttgacattctttggtggtggaaggcagaatctagaatggcccccgagcccctaccctgcggtgtagccaccccgtatcattccctgccttgagtgtgggcaggattgaaaataccacgggattaggtaacatcacagagcgaagaggtgccaaagccactcctatggcgtatgatgttatataagacccctgttggtgacgggagtgaggctctcttgctggccttgagagacagcctgccaggagtcctgcagccaccacgctgtaggaagaacaactcctggagcctcactcaaggccggccacagagtaggtgctcgtgagtatttgatgaatctgtgagtcaatatttccttgtctgggatatgacttgcaatatattttccccctttatcttttatttatggggctggcttatttattgtagtttcagatttacagggaagttgcaagactcattactgggagttcctgtataccccacacccagttcatcgcaactaaagaaccaacgtcggtacattattatcagctaaaacccatactttatttggatttctttagtctttttgttttttagagacagagtctcactctgtcaaccaggctggagtacagtggcacaatcatagctcactgcagcctcaaactcctgggctcaagcaattctcctgcctcagcctcccaagtaactgagactacaggtgcacaccaccacacccagctaatttttaaattttttgtagagatgaggtcttgctatgttacccaggctagtctcaaactcttggcttcaagcgatcctcccacctctgcctctggaagcactgggatacaggtgtgagccactgtgcccagccctttgttttctgtcccaggatcccacatgatatttagatatcatgcctccttacactcttctgggctgtgagggtttctcagcttgtctttttttggtgacctggacagcttgaggaggactggtcaggtattttgcagagccaccctcaattgggatttgtctgatattttcctcgtaagtgggctggggtggtaggtttgggggaggaagaccacagaggtaacacaccttctcatcacatcgcagcaagggcgtagaccacccacctgactcatagctgctggtgaccctggtcactggctgaagtgtgtctgccaagctccactcagcaaagccactctttccgtgcctgccccgtgcccccataccatacttattgggaataagtcaccatgggcagctcacacttaaggagctgggaatcagactccactcaggcagggcttttttcactttgttgccatgcatctagatttttttaaaaagagtatcgatttttaaattatagtaaaaattttaaaatgcatcaatttttaatttttaaaattttaaattaaattgtaatgaaacttatcaatattttcttttgcagtgttttgattgtttggatcctggctagaggagctgaggtaataaaataattttagtctctatagtttcactttttacatttaaatttttgatccatttggaacggatcctggtgtgcccggtgtgaagtccgggctcactgctttctgtatggctaccatttgttccaataccatttactgaaaattccatcttcccgtgtttcactgacttaaggagccactttaatcatatactaaattatcatagatctatttgggtctatttctgggccttctattttgttccttaaatctgcctctctaggagctcctgccacacgttcagttctcaaggctttagggtctattttaatatccgggaggattagaatatcccttcactgtttttcctgttcagtttcctggctcttcttattttttcatgtgaaatttagaaaccatcttaggaagctctgaggatgagggaatcagttggtggatttgctggaatgttaaaattataaattaactttgggcataatgacagttttatattattaagttttcctacttaaatctatgacatgcccctctgttcttattcttttttttttttttttttttttgagacggagcttcgctcttgtcacccagcctggagtgcagtggcatgatctcagctcactgcaatctccgcctcctggtttcaaccgattctcttgcctcagcctcccaagtagctgggattatgggtgcctgctaccaagcccagctaatttttgtatttctagtagagacggggtttcaccatgttggccaggctggtctcgaactcttgacctcaggtgatctgcctggctcgcctcccaaagtgctgggattacaggcgtgacctaccacacccagcctcttcttttttcttctccttctcctcttttcttccttctccttccttcttcttctcctcctcctctccttccttctcctcttcttctgtcttaaggggttttaaatttttccttaaatattgaatattcttattatgtttattcttggcatttaatctttttgctgcaatcataaatggggttgtgtataaagcttctaacaggttactgtgttgctatgaagattagtgatatttttaccttaattttacaccctgctgcaatgccaaattctcttattgtctgcagctttttcagcaattctcttgagttttccagatctcttgggtttttcagcaaatctcttgggttttctcaaatagtttactcctttctgatttttacttctatgctgttaaaaatggttctctttaatttttcagctttaaagggtattttctgattcatttaaagtcccaactgctacagataagctcatctgagaactctttccacttcccaccttctttccctccttctcctctcaattttacttacatgaatcttttatatattatcggaacacatcatatttaaactctattctgacatcctcacccacagttaaatatatttgatgctcaccccagtgctggtaccaaagtttccccatgtctcttggttgcttgggtttgggtctccagcagtttctcataaatggctcatggaacatttcctgagctctccaaagatttacaacttttttttgttgcccagactggagtgtagtggcatgatcttggctcactgcaacctccacctcccagactaaagtgattctcctgcctcagtctcccgagtagctgggattacaggcacccgccaccacgcccagctaatttttgtatttttactagagatggggtttcaccatgttggccaggctggtctcaaactcctgacctcaagtgatccacccgcctcggcctcctaaagtgctgagattacaggcgtgagccactgcacccggctagatttacaactttttatctgtagcctttaaacttgaaggacagcttggctgcaaatgaaatccttggcttgttctttctttcccttattttcttgcagatgttactctagcgtatcctggaattgaatgtggctgtggaaaagtcagacaccagcttaactgctttccctctaaagtgactctttttttttttttttttggcctggatgcctataggattcttttgtttccatagtcaatcagtaacttcactgggtgtgtctcagcattacacattttccccctggagcacacatcagctgtccctgggacccaatgtgtcctttcaagatgcagattataaagtctttttaaaagttcaggacattttccttgaattatatttcaaaaagtgaagcatcaccataccatgaaaagtggggtctgtcaaactcaatcctgtgagatgtgcactcacataggtggaagatcagtggagcagctgagggggctgcagagccacctgactgggaattctggggccatccagcagctcggccaatcagtaccagtctggcagcagtctggtgccacctggttcaaatatcacttctggaccctgtgtctaactaactggacagtggcagggactctaggatgccctgagctgctggcagccgttttactggcctgacctgggaaggctgggctgggagaacactgggaatgtggtgcctccacttcctcacatcatcttctcctccccgagtcccctccactgacactcatttgaagacaggttatgaacaggaaacaggaaccaatgccaaccacaggacagccaaattcacctcattgcaggaaattatggaaatgttttcatcattctggtttccttctttgatgcctcccattatacatgtgttgtatcttctttgcttgcctcctgtaggtttcacttactctgaaacttaaaaactcattattgagttctctttcccatcttgcaagatggtgagaagttggatactgaggagaagaaacccgaagccaagaaggctgatgctggtggcaaggtgaaaagggggaacctcaaagctaaaaagcccaagggggaagccccattgaagctgaaatcccatccttgtcagaggaattggcagatattcccaatctgctacatattccagaaaggccgtgtacaagaggaagtactcagctgctaaatccaaggttgaaaagaaaaaggaggagaaggttcttgcaactgttacaaacagttggtggtgacaagaatggtggtacccggctggttcaacttcacaaaatgcctagatattctcctactgaagacatgccttggaagctattgagccatggcaaaaaccccttcagccagcatgggagaaaattgtaagccagcatcacccctgggaccttctgatcatcctcactggacaccacagaggcaagagggcggttctcctgaagagctgggcagtggctgttacttgtgtctggacctctggtcctcagttgaggacacaccagaaatttgccattgccacctcaaccaaaattggtatcagcaatgtgaaaatcccaatacatcttactgatgcttaattcaagcagcagcagctgcagaaccccagacaccagaaaggtgagctcttcgacacacaaacagagaagtacaagattacagggcagcgcaaggttgatcatcaaaaagctgtggactcacaaattttactgagtatcaaagctattcctcagctccagggctacctgagatctgtgtttgccctgatgagtggagtttatccctcacaaactggtgttctaaatttcttaagaacctaataaaggatatataaaaataaaataactattttttgaatttcgtatacttttcccccttctgcctctggtgtcccttaccgtgtcttctgctgtatccatggccctctgtgttcattcagctatgcatccatttctgggatggttttattatttttcatgaataattccagctcatggttaattctctccagtaatttagccacttagccatctcttccataaatctgtgtattttagccatgtagtttccttcttagtgctgattgtttcattaagttttttttaaaaaatcacagcaggatatcaatttttttttcctagtattctttatgttatggtaaaaataacttctctttcctgtattttttgcttatagcagcttcatattgatgttttgttgttaaacataactaaatgagctgaattttcccatactggagatttgtagcaggtgggaaagggattacattagccttctagaagcaactcaaaggctctgcctctcctgccaaggcaattgacttcattcttcgtccctcagtgggattctctggttaaccacgcctcctctgcctctcccccatggtcaaagagcatttctgccaccttccctgttcctggatgccttacagattgcaggtgcaatccctccaggagacatattttgcctggcactttctaagacctgacaacaccaagcactccctcctccagcacattctctctatattatctcaggcccagctttcacctgacccagccctgtctaagctaagactagctcagatactccctttccttttgcacttcaagatggacttctgatcttcagggagtgcatgccactgactttttctgcagcctgtggctccttggccctctctggagtcccctacaccactcctggccactgctcattgcaccattggcttgctgcccagccctgacctctgctgcctctgacgacactaacacttcttgcccagtctgccgatgctctgctcatgtctgaaatccacaaaatgaagaaaaaaattcttgttgctattagtttataggggatgcagggggagtctcagttctaagtagctgctctgttccttctggaagctcagccaagtctttttgccctgtgggatcaactggcttcattctgatagacgtgtgttcaaaactgtgttctgcagattttgtcaaatttgccttttacaattctgctgttaggttggtgcaaagtaattgcacaattacttttgcaccaaatgcatatcccaaacgatgttgctatggtacacttaagttcgtgactgttaaattatcttgatggatgtacctttagtatttacattaatatgtctttttcattcctttcaacctttctggtgttgtttatttaggtatgcctctgacaaacagcacacaactggattgtgttgtttttaagcctgttttcatttctctaaaagtaggaagatttcatttgcatttattatggttactgagttatttggacttatttcctctactttatttgtattttcagtgtatcctttttcatttcctacttcttgggaaaaaaaagctccacattcactttttttttcctctgctgatttagaaattataggtggcattacatttttttcactgattagcctaaatgttttgagcatatgtttctaactatacacttttctaataaaggctggagttaatatttctattcttcttccccaaattacactgctcctggcatgttctaactccctctaaaacatcacctccaaccaatttattgtttcctagaattttccttttatctgctttgtaaaacaaaactggattttttttttcagtctacacttaaatacatctacctataatttaacagtctatacactcggttgtttcttatacccactggctgtctctggcttcatctatcttctggcaaaagcacagttcttttaaggatggtctgtgggtgataaaacccttagtcttcctatgtgtaaaatgtctttcttttgcccttgctcttgaaaaacaacttaactgagcttccagaaggaacagagcagctacttagaactgagactccccctgcatcccctataaactaatagcaacaagaatttttttcttcattttgtggatttcagacatgagcagagcatcggcagactgggcaagaagtgttagtgtcgtcagaggcagcagaggtcagggctgggcagcaagccaatggtgcaatgagcagtggccaggagtggtgtaggggactccagagagggccaaggagccacaggctgcagaaaaagtcagtggcatgcactccctgaagatcagaagtccatcttgaagtgcaaaaggaaagggagtatctgagctagtcttagcttagacagggctgggtcaggttggcagcaactttccctcggcagtctgcagatatttattgctctgtggtcatctgcctgaggctgctggaggcccccggcacatctgtcattccgctgtttttgccctggtagttttttatgatttttctctttatctttgacatgaatctctagcctcctagatttgcttttattaatcccacctgagagatggagtctacttttgacttaaaaactcacactgatgctcttcaatcctgggacattcttcagctttgcttctccacctgccctgtcaccctacaccgactccctcctgctgaaagccccatgaggtgaaagcgaggtttccccacttgttttctgtccctgcctgctcctattttttcttttacatgtttgcatctctgtgctccatgcacggtatcctattcaaaagcactaattatctctgttcctgccgtctagtaagcttttcaaatgtcatctcatcgccatgtttgtcatcatcaaattctcgaatttttatgttcatctaaatgttttatatccttggtttttgtgcttcgttattccttatttctagacattactcctttctttgtggatcttaaatacacttatttaaaagctgttgctagagtatttagcacaattcacttcatctggaataaattcatgttcgaaatgttgatttcattgatcgccagccttggcatgagatctcgcatatgttagaattctgtcgagacttacctgggcacaatttctttttgtttttttgttttttgtttttttgatacggaatctcgctcggtcacccaggctgtagtgcagtggcaccatctcagctcactgcaagctccacctcccgggttcacaccattctcctgcctcagcctcctgagtagctgggactacaggcacccgccaccaggcctggctaattttttgtattttgagtagagacagggtttcaccgtgttagccaggatggtctcaatctcctgacctcgtgatccgcccacctcggcctcccgaagtgctgggcacaatttctttctttttctctccctcacgcttacccttccctttcagcaagtttgcagttgcctcagcgctggccacttccctaggtctggctgtggcccggaccagcagagaagcctggtcaacttgtctcttacccaaggaattcttggaacccgctgccctgtgtgagctgcccaccctcagggtcacccttgctcaattccgaaccaagggtgtgggtccctggctgccgtgttttagggacacagcaacgttcagctccatcattatcctctctctctccactgtatctggggttgctgtgggtttgaaacggagaggtccattcacgtgaacccagagtcttcctgatggacggggtgcttggatggagttcaagagggggagtgacttagttatttctgaattttggaaagatcatttgcagggcgaatagacagggaggaagccatccaggggcagggagacgggccagggtccactgcagtagccccgggcagatatgagacaggaaggagggctgggcacagggccgaaacgtgtgtgtaacagggcttgctcagagaggtgcggggctgggaccttgctccgactgccctttgcagggcgtgtactgatttgagggcagccagactcattcagatgctagctgaggccaggacaatggctggccccagagagggctgcagctctgtcctaaggcaggctgtaggccctgggacaggagggagcagacagcgccctgggtcgggagccagaagcccaggttctgtctgaagttagcatgcagctccgtgaccgtacatgtggtttccctctgagcctcagcttcctcgtctgtaaaatgaaccttgtaattcctgccccccgctactgtgcagccgccgtgacgacagggggagaaggaaggggaagcacagtcaaccgtgagactcagtggtgatcagagtggggtgatggccaccgccctgcagtggacactgctacctcacatccctgagagaaggggaagcacagtcagccgtgagactcagtggcgatcagcgtggggtgatggccaccgccctgcagtggacactgccacctcacatccctgagcttccactgcccatcaccttgacacctgtaggtacatacatgtcacgcgttttagagcattgcagatgtgaggagcctgctaggaagcatgtccgtgccgcaacctcacccttactgtgagaaaccccagggcagctgaggcagcctgggaacctcagtctgacagtggccccgcccacccccagcctccgcctctgctccgagttgcttcctgggtccccattctctatgtattgctgtaggtgccattttctgttatggctgaaatcaggaggcatctgaaggatggcagaaaggctggggatgtgaggtcacggcccggctggctcaagctgagttgcagctacaaccttgggcaaggtgctgtgagcctgtggtttgtaaatcctaaaggggacacgatcccacctctgtgtgcttgtgtggggtgaacaggccagccgtgttcagcgtcccgcacgtgcctggtgcggagtggggcgtgggatgtacacggcctgggagccctgggcttaggatcatgagagactttggcttccctgtctgtgacctggaagggcagataagcaagtgtccttagggcagtctcagccacacacaaaaggacaggcccttcaaggaggttctggccttggtcacgggaagggcggaacacagctaagagatgagcgttcattacttacatctatcctgattctgggaaaaggttttgtggggcatttgcacaacacgctgaaacagacggtaaacaaggaagaaaggagacaggacagcaaacctaggaaagtaaggtgaagccatgtcataggccctgacaattattagaggtgggacacagactggcctgtgagctccctagctgccacagcaaagagggatgcagggccaggaacacaatcccacggtccactgacctgctggaatctctgggaagtacaggggcgctgggggggtgaggccagccttgtggccccctgggaaggctggtaatgcggcccctttcacgcccataatgtttatatgcaggaaaagctgggagctgtaagtgggaaaatcagggaaggatgataacccaaagtatcgggcagcctcttcacgactgagcggttcgggtcctgagcagtaggttctgaccccaaacctgacctccactcagcctgaccaaaggcagagatggcgtctccagtggcgaggcttcacggcatagactgcagactctgaggccagaagctagagtgtggctcccacctctgaggatcagtgcctctgggcctcagcgtccccatctgtaccatgggctaacaacagtcccttcctgtggggcctgaaactgacccatgttgagcatggacgggcggcagctaacaccctcctaggtggtcttatctcgttctgctgttccccacatgggccttatggggtctgagagctactgaaatatttctccccatggtgcatgggtcactctgggacactgctgactcgacgtccccttctgctgcagcccctgttgccatttagtgtggctccaagcaacccctgggctggccatcccacatgtgccctgctgagggcaagtgccactttctggggagctgcagcgacagcggagttgcccaaacaccaatcatgtttcttcacaaaaatccacacccctactggctgaccttggctcctcctgtgacgtttctgggggcagctactgctgtccggtttctaggctctaactcagacacttcactgacaggttcaaggtccagcagtctgtgcagcacagctcttcttggtatgcatgtatgtgtgtatgtatgtacatgagatggagtcttgctctgtcacccaggctggagtgcagtggtgcaatcttggctcaccgcaacctccgcctcccaggttcaagcgattctcctgcctcagcctcccaagtagctgggattacagctgtgtggcaccatgcctggctcattttttgtatttttgtagagaccaggtttcaccctattgaccaggctggtcttgaactcctgacctcagatgacccgcccaccttggcctcccaaagtgccaggattacaggtgtgagccactgcgcctggccttggtcctcttttaaaataaactttaataaggatttttatcccaggacatgctgtaattgcaagttctatctatctaagtcatcgcatatgtttacactaattatgtaattagatgtaattatactaattgtataaatgcacaataattgactaagatatattaaatactttgagagaacaaagagaatccacccagaataccttccccaatattaagggtgcagctgaaccccaagagaggacagaagggtcatcatgggagtcttgggctgccagccgagccagggcctcacagtgcacctgcaggtgcagacactgccacagaatggaacggactttcttgagacgattaggcccagggccacagaggagacctggttcacgctgcagcctcacttagcagctccttgacttcactggctttttagacatgtcgaaggacaataatcaagtcattcttctgctcaaagatattccgtggctccccattacctaagaataaagctccactttgtcagcctgcattcaggccctccaggaccaggttcccacgtctgtcttcaccccctactgcagtccgaaagcccagctgactgctctgggtgtgtggaatcctttcccactcgtgtgctattgcctatgcagtgccctccagctggtgagctacccctctgcctcctgttctctgctggatcctggcaactcctctacccctgcagaccatgccccttctctccaaagccttcctcagtccttccaggaggaaacagctctctccctttgccctcatctcctgtagcccttcatttagaattctctcacgacacacgcatttttgaacccgttagagtccttggtagccatctctgtctttacccatggaagtgagttttccaagggcaaggaccatggctgcctgcatcctgatgtccctagcctttggcacggagcctggcagggagcaaactcgaaggcatgttgaacaactaaaggaaaaagtgaagggatgcacaacaggtttcctttggtaatgacagtacattgatggggagaatcgttgggagctgcaggggcccagggggtccagggcggggtgctgcagttggggacatggtggtcagaaaccactcctgggggccaacatgtctcaactcaatcttgtggaatgaagggcacaacagggagggaaaagggaaccgagtctgagcttggtggcttacacttataatcccagcactttcggaggctgaggcaggaggatcacttgaggcttgaggccaggaactcaagaccagcctgggcaacatggagagaccctgtgatatggtttggttgtgtccccatccaaatctcatcttgaattcccacatattatgggagggacctggtgggaggtaattgaatcatggggcgggtctttcctgtgctgttcttgtgatagtgaatgtctcacgagatctgatgggtgtaaaaatgggagtttccctgcacaagctctctctttgcttgctgccatccatgtaagatgtaacttgctccttctttccttctgccatgattgtgaggcttccccagccatctggaactgtgagttctccattaaacctctttcctttgtaaattgtcctgtctcaggtatgtctttatcagcagtgtaaaatggactaatacagtaaattggtaccagtagagtgggatgttgctgaaaagataccccaaaatgtggaagtgactttggaactgggtaataggcagaggttagaacagtttggagggctcagaagaagacagaaaaatatggaaaagttcagaacttactagagatttgttaaatggctttcacaaacatgctgatagtgagatgaacaataaggtcaggctgaggtggtctcagatggagacaaggaacttgttgggaactggagcaaaggtgactcttgttatgttttagcaaagagactggcggcattttgcctctgctctagagacttgtggaactttgaacttgagagagatgatttagggtatctgacagaaaaaacttctaagcagcaaagcatttgagaggtgacttgggtgctgttaaaggcattcagttttaaaaggggaaacagagcataaaagttcagaaaatgtgcagcctgacaatgcgatagaaaagaaaaatcccattttctgaggagaaattcaagctggctgcagaaatttgcataagtaacgaggagttacttatgttaatcaccaagacagtggggaaaatgtctccagggaatgtcagagacctttgcagcagcccctcccattgtaggcctagaggtttaggaggaaaaaatgttttcttaggctgggcccagggtccctctgctgtgtgcagtctagggacttagtgccctgtgtcccagccactccagccatgactaaaaggggccaaggtacccctcagcctgttgcttcagagggtggaagcacaagcctcggcagcttccacatggtgttgagtctgcaggtgcagagaagtcaagaattgaggttttggaacctctgcctagatttcacaagatgtatggaaatgcttggatatacaggcagaagtttgctgcaggggcagagccctcatggagaatctctgctagggcagtgcagaagggaaatgtgcagttggagcccctacacggagtctctactggggcactggctagtggagctatgagaagagggccactgtcctctggacaccagaatgatagatccaccaacagctcgtactgtgcacctggaaaagctgcagacactcaacaccagccggtgaaagcaaccaggagggaggctataccctgcaaagccacagcagcagagctgctcaaggctgtggaagcccagctcttgaatcagcatgacctggatctgagacagggagtcaaaggagataattttggagctttaaggtttaactgccccaccagatttcggacttgcatggggcctgtagcccctttgttttggccaatttctcccatttggaatggctgtatttacccaatgcctgtaccctcattgtatttaggaagtaactaatttgctttgattttacaggctcataggtggaagggacttgccttgtctcggatgagactttggactgtggacttttgaggttaatgttgaaatgagttaagactttgagggactgttgggaaggcatgattggttttgaaatatgaagacatgagatgtggaaggagccaggggtgaaatgatatggtttggctgtgtcctcacccaaatctcatcttgaattcccacatgttgtaggagggacctggtgggaagtaactgaattatggcacgggtctttcccatgctgttctcgtgatagtgaataggtctcacaagatctgatgtgtttaaaaaacgggagcttccctacacaagctctctctttgcctgccgccatgtaagatgtgacttgctcctcatcttccgccatgattgtgaggtttccccagccatgtggaactgtgagttctccattaaacctctttcctttgtaaattgcccagtcttgggtatgtctttatcagcagcatgaaaacggactaatacaccctgtctctacaaaacattaaaaaattagccagtagtggtagtgcacaccttgtagtcccagctacttgggaggctgaggtgggaggatcacttgagcccaggaggttgaggctgcagtgagctatgatggtgccagtgcacaccagcatggctcaaagagtcagactctatctcaaaaaaaaaaaaaaaaaaagacaaaaagaaaggaaaaaagaaaaggaaactgggtgggaagggttgaatggaaaagacccagagtggaggatgtggggctggtgttggcctaggatgccgaggaccaagctgcagtacacctgctgccaccaccagttcagcaaaggacggccctgagtcagctgctgtccccgcgccaccatcagtgcaggggctgcgcatccactatgtatttggatgcttcaatatgagcttatttatctggcctccttcagaggctgtgtgggagaggtggagacataggcaatttctggcaagttctccaggcaccttcaggagacatctgcacctctcgtgccagcctggggcacagctacttctacagtgcccagggtcctgcacacacccaggactggccatggcagagaagaggcaggggccactgcccagaggagcccctttccctcctagactcaggacagaggggcccatagccggggcccctaggatggggtgtagtggccaaaagtccccaccaggtgctgtccaggggctcagcaaacatgaactcgcagaatcctcccagcagccctgtgaggaaggaggccctgccattcccaccttacagatgagcaaacagacgcgagctgctcacggtcacaccactggaaactggcagtgcaggacccatgcagaatggttctagaatttgtgctaacaactgcctcacactgccgttcagccagtgcctccctgagatagaacagttgagacctgggcttgcttggcgaggccccatcctggtcgccgactgcacagggcagctgtgcccacggcttgtcgggaccaccccacagtgaggccatccccgctatacacagcggcctcagatggcacctgcagactgagcagggcctgggccctccggagaggcctgtcctacctcggggttctcctgggtcgggggccggtcttccttcttctttttggtggcctgagctccctgagatggctcctctgtgggcggccgcgactctgccgtgctctcgggctgcgtctgcacttgaggctgaatgatgatgacctggaagatgccatggaggggtgaaggggacagtgatggggagggaggggtgaggggaagagaggaggggtggaggggacagtgatgggttgcggggtgaggggaagagaggaggcgtggaggaggctggagagcgagggtgaggggcacagggaggaagggaagagtgaggggggctggggaggtagctggtatggcacagggcaggggttggggagcacagagcctgggccaggccaacctgggagggcggatccccgggaactgggtggtttgcgcccctgtctgtctagcacctgcccctcctgacacaccttttccaccatggggagggtctgcatgagaagctggcctggtttaggaactgggaaggtctgggttccagtcctgccccaccgcttcccagctgtgtggcctcaggggagtcactgcttctgagagtcaggttggtcatcagtgaaactggccacacctctccccagggaggccgtgcacactcaggcggcgaggacttctcatcccagctcaggtgcagatgaactgaggccacgagagctcagacttgctcctggcctgaggccatccagtcaggaggcagaggagctgggaacccctcaggtcagcctggctccgtttctccctccccacaccacagtgcctgagacacacaaccctggcttgggggcacaggtgggaataacattctattttttttcactgccatgaggcccctcacgtggtggatggggaaggggaagggggtcttcagatgccaccctgcagcagccccccttagccagcctgcctcgaggctcagggggtgatctggtttgatgaaacggtgtgatgctgaaagtcagcctgaaatccacccatccggcccagcctctccctgggccaggatccgctccatctctagctctaccattttatttctttggacaggaaattgggaaagaattattagttttcacggctccaagaagaagaattctccaggatccatcagccacagtctggtttaaactaggaattacttgaacttgggtgtttttttggtttgtttttccctaagcacgggtggtgactgtctgatgaatttgaggcttctgagcacaaagagaaaatatgtcccatttttctgctggcttaagggaagctctgtcttcctctttgtatcacatttttaaaaccccaaaatctctgtatggaagaaatatgtccatttttatatccatgggaagaaaaacattaagatctccaataagaaaaagggcaaagaatattctcaagtcacacatgagaagatagaattcttaagtgtaagaaaaacactgaagcttaacagtaaccaagggaattcaactttcaacaatgaggcatctatgtgcctagtaaatgaacaaaacagtgtttaaatgaccaacatcaaatgctggtgcagttgggtgaaacagacacactccttccagcatctgctaagcaccttgtctggatcaggtgccctcctgggatacacctgccatcccaccatggcccatgacaactcttcagactgcgaattctttgaggggccctcagtgggcgggagagcctggaagcacaggactcccgggaatgcactgggtgcaacagcaccagctcacatgagggtcggccgtcaacatccaggctggggaagcagaaggtaccccagccataagcaagagaggggcggcctggcagaccccaaatggggaacagagagaaagaggccacagacaggggacggcagagatgaggcagccccgaaggcctcaaacagcacaaccaccaggagctcggaggggagcagcgggaggaccttagttttagttttaaaacttggcagaaattatgggagattgtgcacttgggcagtggggtaaaaacagcccttgaccgtccaactccaccagcagaaacagagaatcagtatctcttctagtcactcattcagccacacatgtcattaattggttaatcatttgaatgaattcattcattgaccaatcactccttttccactggtattaattcatgcagccgtattgtctctggatcgcatattcattcatttgttcatgcactaattcactcccttaatcatgtgttcatactccattcattcatttgctcctctgtttccgtcccattcattcatttgtccacttgatcattctgcctcctggtcattcatcctgcctgggcttgttcatttggcccttcccaaatgattgctctcggcctcctgtatgcggccgcacaccctttccggagcctgctggtgggcactcaccttgttgtcagcactgatgaggaggggctggactttgatgctgtcactgaccacagacacggcggtgctgggggccatggcggcggcattgctgggggaggtggagatgatggcgtaggccacccccgcactgctcagcggagaggcgagggcggcgggctcggcgagggcctggggctggctgccgggcgctggcacatggctgacagtgttgttggcggtggggagggctgggctggggttcttgacgctgaccacggtggccttctggaatgttgggggctgcttgggtggccggtcccggcccggggcaacggggaggctgtctggaatcagagtctttggcctaacctgggaagaagggacaggtatgtggtcagacaggcagacacacaggagtgcaggggaggggccgccctggctcggagacttcctatattcaaggggaaggggcagcactggaaagagcacagcgcctgtcacggcctcacagcaggtgagacctcgaccccaatgcctccctcctcctgggcttgcaccgactggccacggggctcaggaggggctgctctggacccacggccctcccagctgcactcagagaaaacggtgaagagcagcggggaggcttggaaggcagcgcttgggcgcgaggggacagtctgtgcagtgtgacgccctgcagatcaagtcccaagcggcaaagccccctttggccttggaagtctggaaagcgctgcccctcggcagggactgggaggggcttcgagggctcctgggccttgcccagttctgcttctcagtctgggtgggggctgctgctgcgctcccgtgaaaaccagagctgagcccgcgtgactgcggcgggcctgacagtgaaggtgtgcagagggcagccgggcagccactgggtggttcaggccagggctctggacagactgttggtttgggcccaatcctggctcctctggggtcctggtgacacacctgaactgggccaggtccctcatctgcatgaggtgatgagacttactggggttcggaagaaagaaaatgcacaggaagtgctgggtgtacttgactgagggctgtcaccagcacccccacacccagcagagtgtttctgatggtggaaattcccatcagagccaccaccactgaccccatgcatggaaccaggagcgccacatgccccagatgaggacacaccaaccctgggaggtccacgccaatattatgccttgagagacaaggggacaaggagaaggggtacgacctgccttctcatctgaaccccgctgcgctcgcactgcagggtggccatcctggcctgttctacagataagcaaactgaggtgcataatggagcctcaccggtaataatgatgctaccgtcgttatcattagggcctgtctggcatcggtgaagggcacagagcgctgtactgccccgcccatctcctcccaccctgtgtccagtggtgcatgtggaaggagtggtccagggtggctcctacagggccctgtggccttgggcaggtcaccaaggcacagcgtgctcttcagttggacagtatcacgtctgtcagctcctcaccagtgcctggcacagagctggcccttgagtctagtgatctctgtgtcccctgccatgctgggtccttagcaaaatgagcccggcctcccacatcagggccctggccacaccacgggcaggcgatgtggccagcctgggttcaggtaagcctgccactctgtccttggcaccagaggtcagggcctttgtcccccaatgccaggcttacagcccaacagaaactccaataccaaaggctttaaaaaatccatcttctcgttcctgccggccctcagctggagaaagttacccgttggaaaactgctgttctccgcctctgaagaggactggcgtgggggcggatggacacccatgtggtggtcagtgaggacctcagctgtggcagtggccgttccgtgttctggtcgatcatctggggtttgcccacatgttcttgttgaccctggccgcccaccctatgtaagcagactctgggcatgggcgagctggcgtcaatcacagatgccagacacagaaactaagctcagctggaagctcaggatctggcctgagccaccccacagagaacaccttcaggggaccttggagcttatcatctttctgcctgtgcctcctggcctgtatgcagccccaggccgggaagcccccgggtccaccctgtccccaccctctctcctttctcagatctgcagtcaccctgccaggctggccccaacacaggctgcctactctgttgcccgtgagccacctgggacagcagcagctggtagctggacccggcatgcactggacaccttctggcccaagctgactgtcctggaggccagcaggccaacggcaggtgcagacttttgtggggcagagacagcaaggacaaaacatggagacagaggtccaggcggaagggagagaggaagaagagagggtgctgggcagagggaaatagcactggccttgattggcagcctctccctggagcctgccttgctctgaagcctcgcatagctccctgctgcccaagggtcaccgacaggagaagtccaactctaaggtccccatgggcccctggtggcctctccacccccaggactgtcccaacctccctccctcagtgctttgactctggtctctccctaccacctctgcctccgtttctcaccctgcaccctcctcctggggggctccctctagggcctaactctacctcagcctgcaatgtcctcttaccctgaggtctagctcaagcactacctcctccaggaagccttccttgatgcccaggtgtgtggcaagtctcctcagggctcccgccccgcagtgtctctttctggcatggcccgatcaccctggactcacagtatctgtttttccttgtctgtcctccctctagaccaagcctgtccaaaccacaggctgcatgcggcccaggatggcttcgaatgcggctcaacacaaattcaaaccttcttaaaacagtacgagagttttttgccatttttttccctttatctcatcagctactgttagtgttagtgtattttatgtgcggcctaagacaattcttcttccagtgtggcccagggaaaccaaaagattggaagattggccacccctgctctagactctgattcagctcaagtgggcacttggggaaagttgccacatgaatgagggagctcagggcggccacctctcaccatccttgagctgggggaatctgtctagccctgaggtcccacgacaggcaggggccatcttggtctttaccactggcagcctctggcccagtatgctatatacagcaagtgctcaacaaagctgagcttgtggtaataagggagctggctaataactacctggcgtttgctctgtaccaggcacggttacaaatgttttgtcttgactcaatactcacagccaccattggctcaaccctcacagccaccaacgaaggaagccggcacctgcaccagtccctctgcaggtgagaagcctcggcccaggaaggctgagaggtcaggtgactggggcaaagcgtggagtccagtcgggggggaccctgcactagaagccagggcacctggcccagagtctgtgctgcccctccctgaaatgaatcccctcgtccagagtgtctcaaacttcctgaccataacccatagtcaaaaatacacacgacggagtcacccagtcttgaaacaagttggtcaagaaacaatgcataggatgcatatcttgatatttccattctattttagtctggcctcatttattccattttaaaaaattctggtcatgacccactaaattgatttcccaattccttgctgaagaaacgtatctggtccaaatgtttccattgaagaatggatagaagaggtaagaggggaaggtgcagctgagagggcacgagttccgcctggcccagtgcccaccagaaacctcagtgctgaggggttaggaacagagactgcggggacagacagacggacaccccagggcccgcccgagggctgcttacctgaggtagcactgccgctccttgcccggccaacctctgcaaggagctgacctgaggacccgtgacaggcactgcagtgatcgttcccaaagcctgaaacatacaggagggcaacgctgagacaggaggagcagctgagaccgaatccgttgcccccagcctggccaagcagggggcagctgccttggagacagcaaattctactcttccctttcttaattatgatttttaaaaaatcacaatagtaatcgatattccttccagaaagtttggaaactagagaaaggaaaagagcagcactgcccagaaatcaattaccctttgttacacattggcttcctcttttaagtgaattttttatacagctaaatatagaatgttgtaacctatttttctactttcacttaaggacaaggtgtgatgtcgctacgatcttcataaatcactcctttaatggctatgggatcttccattcagcagacataatggtatttcctcagacaatcctctactcttggaaatttgagttctagctccatctttttccagttaataaacaatgctgcagcgaacatctttgtggataaatccatttccacatcacagagcatttctgtaggagagtctgaatatggggatccatggaccaaaatgcaggaatattttcaggcccttggtgcatatctgcactgggtccctcaggagggggaacggcctgggtgtgcaccaacctgccccccaaatcccagccccccaatatgggggtctcgccaacacacgatgggatggcagcaccactagcagggtggacattcagggtaaggagaagggagatggcaccctcccaggaattccaggcccacacgcgtacaggagatgtgttgtggggtgctcacttgtctaaagtctccttttgtgggaaccaccactacccacagcccccgatggaaccggaacagttctttttttttttctttttttttttcttgagacggagtcttgctctgtccccaggctggagtgcagtggcgcgatctcggctcattgcaagctccgcctcccgggttcacgccattctcctgcctcagcctcccgagtagctggaactacaggcgctgccaccacgcctggctaattttttgtatttttagtagagacggggtttcaccgtgttagccaggatggtctcaatctcctgacctcatgatccaccccccgcctcggcctcccaaagtgctaggattacaggcatgagccacggaacccagcctttctttttcagatggagactcgctctgttgcccaggttggaatgtagtggcgtgatcttggctcactgcaacctccgcctcctaggttcaagtgattctcccgcctcagcctcccgagtagctgggattacaggcgcccgccaccacgcctgggtaacttttgtatttttagtagagatggggtttcattatgttggccaggctggtctcaaactcctaacctcaggtgatccacccacctcggcctcccaaagtgctgggattataggcatgagccaccgcgcccggtcctgatggagcagttctacatggctacattcgcaccccacgagcctgcctgatggggagagagggaaccccttgctcagatccagtcaaaccatcagtggccagggaccagtgaggttctctcttgatctcagatgcagaaattcttaacagaatgttagcaaatcaattctaacaataacaaaaaggataagacatcatgaacaagctgggtttatcccaggactgcagggctgctttgccatttgaaagtcagtctgtgtaatttgctaaaataacacatggaagaagaaaaaccgtatgccggcctcaacagattttcaaacagctgttaggactaataaatgagtttagccaggttgcaggatagaacaatatataaaaatcagttgtgggctgggcgcggtggctcacgcctgtaatcccagcactttgggagaccaaggcaggcagatcacctgaggtcaggagttcaagaccagcctgaccaacatggagaaaccccatctctactaaaaatacaaaattagccaggcgtgatggcacatgcctctaatcccagctattcaggaggctgaggcaggagaatcgcttgaacctgggaggtggaggttgcagtgagccgagatcacaccactgcactccagcctgggcaacaagagtgaaactccatctcaaaaaaaaagaaaaaaaaaatcagttgtgtttctatacactaggcaccaacatttagaaattcaaaaaattttaaatgccatttgcaatagcatcaataaataaaaataagaaatagggatgaatctgacaatagctatataagacctgtacactggaaacttccaaatatcgccaaaagaattgtttaaagacttaagaaagagatataccgtaaccatgaatcagaagcctcaacattgttaagatttcaatccttcccagattgatctacagattcaacacaacctcaaatcaaaatctcagtcagcttttttttaaaaaaatagaaattgacaagatgattttagaatgcatatgaaattataagggacctagaatagccaaaactatgaaacaaacaaaaataacaaccaaacaaagggaaagatttaacattatctgactccaagacccgctataaagctatggtaatcaagacagtgtagtattggtgttaagatgcataaatagatcaatggaacagaacagagagtccaaagtagacttacacatacatagtccattgattttcagcaaagcccaaaaaggtaattaatttagtacaaaaaagataatgttttcaaaatggtattagaacaaggagatatatactaaaatcgaacagaaaagaacttcagtccataccacataccatatcaaaaaaaaaaaaaaaagaacaaatggatcagagatctgaatgtagggaccaaaactataaaactgctcgaacaaaatgtctcaaataaaatgtaacagaaatctttgggatgttaggtcaggcaaagaatcttagatacaacaccaaaaacataatcgatataagggcaaaataataaattaacttcaacaaaataagaaactcccaaagatggaaagagaatgttaggaaaatgcaaaaagtggccacaccctggaaaaaaacacatacaaatcacctatctgatgaaagccttgtatccataatatatgacagaactcttaaaactcaataatctgaaaacaaacaactcattaaaatgaacacaatatttgaacagatactccactaaagaagatatactgggccaggcacagtgcctcatgcttgaaatcccagcactttgggaggtggaggtaggccaatctcttgaggccaggagttcaaaaccagcctgtgcaatatagtctctagaaaaaaaaaattaaaaattagctgagcatggtagcacatgcctgtagtctcagctgcttgggaggctgaggcaggagggtcactttaggccaggaggttgaggctgcagtgagccatgattgcaccactgcactccagcctgagtgacaaagtgagatccaagaagaagaagaaagatgaagaagaaagaagaaagaggaggaagaagagggagggagggagggaggggagggaagaggggaggaaggaggagaggagggaggggagggaagaggggaggaaggagaacaacaacaaaaacaactactgatggcaaataagcaaataaaaaattactaaacataattagttattagggaaatgcaaattaaaaccacaataagatactgctacaagcctattcagatggctaaaattaaaaagactgaccaaatcaagtgctggtgaggatgtagagcaaatggaactctcaaccactgctgtcgggaacataaaatgatacgctttgaaagacagtttggcagttaaaaagttaaacttatgtatggcaatgaacagaacgtatgtgtcctctcccagatccaaatgttgaaatcctaaccctcaatgtgatggtatttggagatggggcctccgggaggtgatccggtcatgagggtggagccctcagttagtgctcttataagaagagacacgagggagtttgtgtcctctctctctctcattctctttctctctctgccatgggcaaatacagcaagaaggtggccatcagcaaaccaggaatagagccctcatcaggaactgaatctgctggcaccttgatcttggacttcccagcctccagaaccataagaaactgatttctgttgcttaagccagccagtccatggtatttttgttatggcagcctgggcagactaggacatttatgatacgagacagccattctattcctaagcattcgccaagagaagggaaggcacgtgttcatacagagacttgtacgtgaatgttcacagcagctcttggtgtcacagcacaaatgggaagcaacccaaacgctcaccaacaagtacacggatgagcaagctgtggtatcttcacacgacagagtattactcagcaataaaaaggaacaaactactgacacacacaatatggatgaatcacaaaataacactgccaaaaaaacccagactccaaaaaatatccatactgtatgatgctagttatacgaaattctgaaaatggcaaacaaagtgacagaaaataaatcccaggttttgtggagatggtgcagggacgagaggaagggattacaaaacgacaccaggacattttcagggagaaagatgtgttcacgatcttcattgtggcaatgggttcacatttgtcaaacttatattgtacattctaaatacatgcagctcattgtgtatcacttatacctccacaaagctgttaaaaattccctccccatttctctccttatctaatctctctccacccctagaatgaatatcatccatcctcaaatgacatggcagagggtctcaggccccaccacagagctgcttctctcattatgctcggacggcggttcctgcctcctctttgccacctgtcccatgggggtcaaaactctgagaggctcatgtcctctgagccaactgcctgtctctctgcatggaaccaaatgacccacattcccctggatatccactttggacatttgttaaaacagagctttttatgcaatgcggagcccatgacaaacagcctcggccactggatgaggcagctcccaatccataacaccgcctgctgctcttggctggcacagcctggcgggcagcactgagaccacctcaggtgccacctgatgcccgcctcccctaatgcatgtctcaaagatggggggttatggggattgtcctccccattacctcgaactccacgaccagtgttcccccaacttccacaaagcaaggtgtgtggaaggctctgatctccccgcccctggcctgccagccagtgccatttatgcagctggtcaacagtcagggccccaggccagcccagactgtgggggcgggaggcaagcaggagcagccatttgatgagccagattccaggtaactccacccaactggggccgcaggccgagagtaagcaagccctgtggtgggaaggcccacgtggcccggcctgcagtggatttccggggaagtgggttctgtggtgggaaggcccacatgccacgtccctaaggtgtgttccctggcaagcgggttctgtggtgggaaggtccatgaggcatgaccctgcaatggattcccagggaagcacattcagtggcatgaaggcccacacggcatgtgggttcctggggaagcaggttctgtggcgggaaggcccacatggcatgtccccgcggtggattcccgaggcaggttccccgtaagtgtgtgcatgaggggcaggccgtggggccccggggaggagaaatttccacatggatggggctggccagcatatccaataggggccagagaacaggcacgaacctgttttgctggggcttccgtcctcactcagatgccccagataaaacctccaggcatgggccagcccgtgaggaggtgtgggctggccctccaggcaaggcgggtgtgtgctgctgtgttttccaagcccacatgtgcctctgtgagtcctggagggttgctgtgtgaagttgctcctgcagatagctctgggtgggctgaggaggccgaggacagccatgtgtgttttccatgttgcctcgtggaccaagggttgccgtgtgggctgggatggcgatgtgtccatgtccaagtactgccacgtgggccatgggtagctgtgtgttttgtgtgttgctgcatgagctaggggtggccatgtatccgtgtccgggtgttgctgcgtgagccgggggtggccgtgtctgtatccgggtgttgccatgtgggccgggagtgaccgtgtatctgtgtctgggcgttgctcagcagcagctgttgctttctctgatacccactcaggtgtgcacagctctgcttccacacgagttcttctcgggagcgtctttggctctgtgtctgtgtttctgggcctcatatctggtcaaggctcgacgctccctcctgacttgggaccctgacaactcctgtgcccttactttaggaattcacagccggggacagggaaaggaggggagacccaaaggagagggacggatggaggcggcggagaggcagaaccccgagagagaggtgaggagatgacaggaagagctatttccacttgatcctccctagtcagttaccaagaaagggacacaacccgccctggggaaacgtccacacccgcaggaggccggcaacaaacagtgcctggccatgcgtgtccccccaaaactccaaaccaacggcctgtgtgcccctgcctgggactcgaggtgccctgcagctcttcagggagcaaatatggggtgccctcaagtatccagcacccttagctaggcaggcagaaagagtgggctctgcaaccatggacctacagccccagcaccaaaggagagacgattctgagtcaaagtccaaagtccccattatctggggaagagtctgctgcaaacagggctgccttgcagggccccctcctcaccgccctggggacggtgggttccttttcgaacactgccatccccttccaacaaccgtccattctccgccaatgctaagctagcttcaggctctccaatctctacgtgttttcttcactccaagcctacccgagtgcgttcttccacttccctacaaacctttaattagcgagctgaaagccatttttttctggcaagggctgacctttctgctccaagctggaatttattgacaccagcagaaacaatcatctcagactcgatttcaccagcaccaggtagtttacagccgcacttacttcaagatcaatgagcttgtgactacgtttacagctccaagcattttaatagggggtaaaaaacgggccataacagtcaaagataacttcaaattcttcctgccatggctgagtctggggcggggcggggcacagctggggaaatctctaggaagctcagacacggggagacagcgggaaggagacaggtgttggtgcagaccctacaaccttccagggcaaaagccacatgtggctctggaaaaatctgtctttaataaatgtttctgagcgctctagggacttggctctggagctctgccagggcagaggggttccagcgctggctttgacatcagctgtgcgggacccctcagctcttcccacccccgcttcagcacgcaccaccaggactcaccccatacggcaacaccagcctcacgcccgccgtcctcgaactgccaggccacagtctaactccctgactgtcccattggttacaagcaggacctggtccaggacgagccctgtcatttgtgggtctcttctgcctctttccatttagaacagccccacagcaccccttcttcccatgaaaggaacttttttttgagacggagtcttgctctgtctcccaggctgcagtgcaatagcgtgatcttggctcactgcaacctctgcttcccgggttcaagtgattctcctgcctcagcctcccgagtagctgggattacaggcgcccaccaccatgtctggctaatttttatatttttagtagagacagtgtttcaccatgttgactgggctggtctcgaactcccgacctcaaacgatctgcccaccttggcctcccaaagtgctgggattagaggcatgagccaacacacatggcttaaaggaactttttaaagaaaccaggacaattgtctacagaaggcgctgggtttctgtggctgcttcctcgcagtgggccgtgtttcccatggagaccctcactggacaagggtggaccaggctctccagagtcttcacccaccattcaggccctggggctgcagaggccccccacccctcaccgctgaggccccactgccggggctgaggacccacaggcctctggacatttgagcttcaccaggctggggaggcgagaggggaggcagccccaggcctcccagaagcccccatggaaggcggccttgctctcctcctctccacatggcccagccgccacgcgcacagccacagagcacggcaatttaattgcttctcgagttgcaattttccttgcatctttagagaactgctgtgatgtgtggcaaagataacaagtcagttccaacatcaataaccgctaataaatattaatataacataagcaccacttttactgtcatgtgaaaccagttcattattcacagatgaaatccaactgccgcctttatcactgtcaggaacgaacgagctggttccacgggccgctgctgctgcatgagaatgtgcttaggcttggcctttatgtccccatttggtgtcccccaccctcatccagacatcccgccttcatgagccccaagctcatccaggagggaccagcaagggccacggcgagtgcatgtgaaaatccaggcaaattccacttgctctggtctcagctggctgccctgtgcctcctccagcccacgtgcgtttaccaccatgcccggtgcacctgcaacaaagaccaccatggggaggccaacccatgtgcatttgaatttgacttctggactggcgctggtcatgccagactcattgctcccccacctccaaagaaagagggcaagaactgctgtcactgttacaaggaccagaggggaggtccctgtaccaggagatgcccggcacaaaggtgctctaacagcagccggtggcactggcacttgagtcgttccaatggtgccactgcctctcagtcctgcgcgcctctgtgggccaagacacacccacagaaatgcagcatgaggcggcaggcctgagggacccacagagatgcgagggtccaccgggctggagggaggggaggcgacaggtcgaagatgaggtgaggcagcgagcccaggcctgcagttccaggaaggacccctgcagcacctgcaaccaggcaagctgggatccacccactgtcactaggagggaaaagaggaaccagaaagttctcatacaatggaaaacttcccagcagccagagggaagaaaccagacttgcccgggtcaccaagagtgtggaagacacccctcggggtgaacaacacgagcacctgcgtctgcgcacagcctgactccatccgctcaggcaaagccagcactggggcgggtgtggcctgctggtgtcccataaacgcacacagccagggctgggtctatccccaagtcatgactgcggctgcccctgtggaggggagagggagaggaggaagctggaggatgcctattgcctctaccgtgtactagcctttaagaaagtgatcagaagcaaactgcccaacctccctgtttacccatttgggtggagaacatgtggaggcttactatagggccctttgtatattttataataaataaatatgcatgaaggagacagagggagctctgtctacagctggaagcaggagggggtgtctgagtggcaccttgcaagctggaccggaatgttaccagtgggcagtcaggaaagcacataggagtcgggaggcgggacaggagggtggtgggaggggcagaggcaccagcagcaggggtgccaagaggctcagagcactggaggctacagctcccaaaggtggacagtgaaggaggagaggaggggcctgccaccaggggccctgaatccatccatgcccaggagctgaatgtgagtcaggcagagcactctggggcaggcaccagaagggctctcacctcttctgacaggataggttgctggccaagccctgaaagggcagggcgcaagggcggcaccccccaaccccgaggtactgaggcctgtttggacctcggtatcttctcctgccaggaacagctgtccggggcctgcagcccttccccatcctgaatcctgctctctcccagggtgctggtgacagccccgatacccagcagctccggagaggtgagctacgcccaggggactcttagaagacctcaatgctggaaccctcttccaaagccagcttcagcaagccccacaaggagtcattttctttctttcttttcagagaccaggtctcgctctgttgccccaactgcagtgcagtggcgcaaccgtagctcactgcagcctcgaattcctgggctcaagcgagtcacccatctcggcctcccaaagtgctagaattacaggcatgagccaccatgaccacccgaagagtcactttctaaagttctgactccagaatgctgctcatgtctcgctccgaggcaattctgtttactgagagcactgcgggaacaaagatatgcggccgctgtggcccggctgccaggcgcaggcggctcccacccggctcggtctcggtgaccctgaccaaagccaggccggccgaggcaggctgcccagggccacttaaccaatcgcagaggcctttacaggcagctgctcttaatcaaaaagtgccagacaacacaagtggctaccgtatgctgacatttaaaacacccgttcagcggccctcggcgttgcagagcagtttgtttaagttgaaaggatgtaattttatgctatttagcaaaaaaacacacactctgaatggcatcatgaactaaggattgggggttgtgatcttggggggggggtgtcaaaaaatggttgtgaggtcccccgtgaccacaggtgcatgtgtagaggtgtattctggaaacttctgcacggaagtggcagcctctgaggtcacgctagttctgccgtggagggtgtccgtgagaccagctaaaacggccacttctgcatctactcaactggaaaacataccatctggaagagatctggactccaggggcccaggagcccaccaggagcctcctgtgcaatccctcccaccgtgggccctgctctcagagaaggactggcacagccagcagcctgctgggaatgtccaaaatccagggaggggctggacaggagggacatctctaagctgcgtcccccaggaaggaaggaaggcagggcacagggaaagacgcagccttgaggccttggagagggtgggtgaggccgtgtcactcaacagaggacccggggcagaggctggaggcctcgaacctccactgggaagacccggaggttagttttccctctactcatctgtttcctaaagatgcagcaaaatctgttctttaagaggggccatgggcttgctgtaagggctgccaggagagggcagattggggggcgaatgccccaccccagagaggagaggtgctgcctctcttgagcctgaggtaagaggaaaaacacaagtggttggtacttactcgtccctgtgtcacagactgctcacccactatcagagtgtccttattccttcctagccagggggccctgaacccccaacctgggcccttggatctggagtggccgccaccaccaggcacacgtcttccaaacaaatcacagtagcagcaaaatccaatcgatggtagtgcctctagctgcctgtccccactgacctccagacctctgtaaaatagacggtcattgagaagatctaattcccacaaaagatgggttcacacagtcccgctggcctcagcttcatcatccccacctccgacggcctgggatctaactgagggtgcaccacggaacgctgatgacggcctggaatctgagggtgcacctccgcacctgcaccacggaatgccgatgacggcccagcaggtgctcctctctctgcagaggcctcctggagctagccttggtgtgggcagggatgcaagggtgggtggaccccagtcaccccatccccaacccctggccctccagaggaagggcccattttacttccagtgaatggcacagagcttaggccacagctcactggatttgacaaacatctacacccaagtaaccaccgtgcagaccaagatacagaacattccagcaaccctagaggtgcccacaagcccctcaaagggggccccgcattctaacaaggcactcgccaaggagagcaggtcctgtcctcggggacagacttctggttggattggcaaatgctcccgccccgctgtggaaacagcttcaggtctcttctatttctttttttttttttttgagatggagtctcactctgtcacccaggctggagtgcactggcacatctcggcttgctgcaacttctgcctcctgggttcaagcgattctcctgcctcagcctcccaagtagctgggattacaggcatgtgccaccacgcctggctaattttgtatttttggtagagacagggtttctccatgttggtcaggctggtctcgaactcccgccatcaggggatccgtccgcctcggcctccgaaagtgatgggattacaggcgtgagccactgcgctcggcctcttctatttcctgaagccattggcactgactaaactcagcaagtgttcactgcacacctaccccgtgctgggtcccttgtgcacagatgagaggttctgcccgcgatctggggaaacagaccagaagtgagcatcagaacgtgctgcccgcaactcaacggaagtgcacgggaaggtctcggctacatagaaggggtaagcgttaagtggggtgggggagccgtctgaggttggtcacgcacctccatgcctagttcatctccaccattccaggagacgagtatctggagctcttcgtgcagataagagagagagagagagagagacagacagacagacagagagacagagacagagagacagacacatgactgccccaagcaagtgaggaatgaatctgtgtgtaccctgcaccgcgagggaagggttttccgggcacagtaactgaatacaaatgatttacacaaccacagggaaggctctggcagtccccaggagacaggccatggactcgtgaagcgtccttgtctatttactgagatcctgccatgctcagcagtcgctgcatttccacgcagtttgagggacttcctggtgaaaactaacaagaaaatatatggcatgtgtaaccacaagaccagaggggcccttcttgacctctgcttcctctcctctgacgtgggcatggcagcccgtcccctcctggggactgctgacccagtgggtggtcctggtggctgccacaaggcagggggcctttgcacggggctcagagtcccatcggccacttcctcctgactctcaggtgccgctggccctcacctgcacctcacccacctgcttcccctgtcctggagcgtggcggtgaggatgttagaacagcctggtacccagccacccatcaccgcacgcgacctaagacaagacaggcacatagaggagcgatgacatcatcacaacaaacatgaatgagactccttacagacgtccacatccaacagaagggacttccacgagcaggagtttttttcaggccaagaagggacaacatcgtcccaggcagagagggacagtctagaggtataccaggatggcgtggtcaggaacagagccctcccctgccagggcgtcaggtccatctgggaacgggcaggtgtcagcacatggacagaccacacccatcaagctaagctgtctcgactctgcaggtaggcactggggctctaggagtttccaagccaagggtaacatcacgtgggcccataactggagggtgtagggagtcctggagtcccctgagtctggggttagaagaactaaaggtcccctcagccagaagcttctgattcgtccaaagtccccactgcacccacttctgcaaagtgtctgggatggccacatcgcctgtccctgtctggtcctcactctttcctggtctggctgcttaactccagacccaccgaaagctcagcaggccccaccaggccatcctgggaagtgtcccagccctcgctgagaccttccaggagcgtgggaagagaagacatgtggcgctaggctttggagaggaggacagtccctgctctgctccagaagaagttcccagggcctttgatatctctgtggctggttaaacacacacgctcatgcagtatattcactttcatcaagagaaaaaggatcacggcaatcggtccagtggtcacccctgtccccgacacactccctctgacctgcgtctaactggaagcttcaggaacatagcccaaagatctgagagcaaaccccagtcctgccacctaagggttatgagaccctgaacaagttactcaaactccccgagccccagtttccctcctctgtaaacagggagaactaacgttcacacaggtttgccctgacagttaaaacagaagcacatggccgggcgcggtggctcacgcctgtaatcccagcactttgcgaggctgagacgggcggatcacgaggtcaggagatcgagaccatcctggctaacacggtgaaaccctgtctctactaaaaacacaaaaaattagccgggcgtggtggcgggcgcctgtagtcccagctgctcgggaggctgaggcaggagaatggcgtgaacccgggaggtggagcttgcagtgagccgagatcgagccactgcactctagcctgggcgacagagcaagactccgcctcaaaaacaaacaaacaaacaaaaaaaaaacagaagcacatggctcacacctggcaccttggaggccccaagaaactggcaggtctcatgggagagggcaacagggccttctgcagctgtgacttcaagctgtttaacctcctgagcctcagtttcctcatctgtaagatggagatgttgatgccagcttcacagggggagcagagttagcgagactagaaaagtgttcagctcaagaaggggtggctctgccctgtctctgcccgcctcggggaagctccaacctcgcacgaacccactctgggctggggcccagagctgagcctggcgccacgccgtgctgcccaggagacacaccacattctgttctctctgctggggtatttttagaaggaacagcacttctaactgtgcaaataacgtgttgaaaataagctttagattttgacttaaatgtactaggagaggcggaaacattccttgtcctccaaataccgtggagaacatctttttggagggtcctgaagaacccggctgctgtcttcactcctgggatgaatgggccaagccccctcccgggagagctacggaacggggctgtggggtccgccttgtcacctgcatgagccctggagtgctcctccctggccatgtccagtggagacggcacaggggaagctgcaggtcccgcctggttctgaaggcggctccttgtagagaggccgcagcctcaggccgactgtctctctggcccagcagaaatgctggctcctggcctgtggccctcatctctccctgtataccggcagccctgtcgcctcctgtccccagcccctctccttcgagctccagatctgcgtgtgacatcccacctggatgcctcgctgcccactcgagacaggaccgcctcctgccatccgttactggtgagcccttgcaagtggctaacctgagctgagacgggtttcaagtgggaccttgaagactcatgaaaagatattaaagtatctaattaatattttaaaaatgaagtacatgctgaaataatatcttggacatattggattacataaaataattattaaaatgattttcacccccccaggttaatttcacttgtttctttttactttttttattgtggcttaccagaagatttaaacttacacatatggctctcactgcgcttttattagacaatgctgttctacaggaaacttgtaatttaagacaaaagttgtggacatccactttctttcttttttttttttttttcctgagatggagtttcactcttattgcccaggctggagtgcaatggcgcaatttcggcttactgcaacctccacctcccgggattgtcctgcctcagcctcctgagtagctgggattacaggtgcccgccaccacacccagctacttttttgtatttttagtagaggtgaggtttcaccatgttggccaggatggtctcgaactcctgacctcaagtgatccaactgcctcggcctcccaaactgctgggattacaggcatgaaccaccgcacccggctgaacattcgcttctgctgaagaagtggaaggatgagaaaactttaactccatggtaacatcaaaacacacccagacaaaataaaaatcctattcatccccaagagcagtgactacgagaaagccttgaaggaccaagttccagggagaaaggagcctcaaaggctgggcagagacggagacatcacagccaggcggccaccaggtgtgaacacaggtgcacactcagcacaggtgcaggccgctgaggacggagacccaagtgggctgagctgggccatcacggagtagccgggtctctcacaaaccactgcaggagtgggaggcagtgcgaacacttcaaaaaatagttgggtcatttcttacaaaactaaacacacacctgtgctctctgacccagcaatttcactcctaggtgtttacacaagagaaatgaaaacctgtatccccaaaacatcatgtgcatgaaaattcggagcagctttattcataatctcttaaaagggaaaacaactcaaatgtccatcaactggtgagtgggcaaacctactgtgggacccccacgccacgggatgccactgagaaacacgcagggaaagaatgacgaatactctcgatgacacggaggagcctcatagcactgcgtggaacgaagggagcccacacaaaggccgcaggcctccccggacatgaggctcaagaagcagcaaaactaatccctggtgatgaaatctcaacagcgggtgctctgcgggacgcatcgcgcaggtgcagaattttctgaggtgatgcaaatgctctattttggagtataagttacctgggtgtacacaactgtcaaaactcatccagcagtacaatcaaaatctgtgaatttcaatgtatgcaaattttatctcaaattttaaaaatctatgtattttatttttgagacagagtctcgctgtgtcacccaggatggagtgtagtacctcgatctcggctcactgcaacctccacctcccaggttcaagccattctcatgcctcagtctcccgagtagctgggattacagatgcctgccaccatgcctggttttttgtttttttgagacagagtctcactctcttgcccaggctggagtgcagtggcgcggacttggctcactgcaacctctgcctcccaggttcaagccattctcatgcctcagcctccagagtagctgggattacaggcacctgccatcatgcatggttgatttttgtatttttagtagagacagggtttctccatgttggccaggctggtatcaactcctgatctcaagtggtccgcctgccttggcctcccaaagtgctgggactacaggcgtgagccactgcgcccaaaaaatctatatattttaagaaggacaagagctgcagctccaaccctcatagaaaggcagggccaagggggcagctagaggagcccagctggtgcacagacctatgccctctcaggggcagcactgatagaccctcattatggcagctgcatggctaagatgcttcatctggaatggaatcaatattcatagttatgtcaatgagggcctgaaaaataaggtgccatctctaggaggagacccaggaccaggatcaggaacaggttctgggtggcactgaatatggggcaggaaatctggatgcgccattatggaaataaatgcactctggcctcactgatgaccaggaaggcactaaggaaggactcgtgtctcgcttctctgctatgcattgatagcacctggacctgcagaaaagcaggagctggttgaggactgaaaaagaccaaggacttcacaaaacctccaccaggctgctgggctgcacacacacggcgcctccagtgcgtgagctcagagccggcaccgaccatctgcagcagctgcacaagcgcaggcccttcctgccttctgccaagaccccttaggagcctccagtagaaaactcaagatcggctcagacagggctggggaagagggagactcccgctgagccaaaagcaggctgctgtgatgagccagggactgcgggaagctgcacgacccatagaggcaggagacgctccttcacccacggctggggagactctgaagctccagggtgcagttaggtaagtggagaaggagagagggctgtgggtagaacacgtctgagctctgccccaggactgccatgtgtgactggtgtccccacctgaggccttacctgtcaccttgcaaagttgccgcgaagtttcaatgaaatgcaggaagcactgcgcactgagcaaatgccaaggttctcccactggacctcccacgagcttcccaggtgggggcggcagagggggctcaacgcatctgtgagcacagtggggaccaggaaagggtgaaggagatgctggcgctgtcttggaagttaagtagggttcccagacatggggcggaggtaactgtgggacacccagcccgtcctgtcccagcatcaacgaggagaccaggagaagtcacggccacaggggatgggtgggagcagggctagggaggggcgaagggatagggccgaaggcagcaaaggccacctgcaggagggtgggtctgaggaagagggagacgggtagagatgggagcccagcagtccaggagctgcccagtaatccaagatgaataagaggctgcccacggaggcagggagaccaggaggaggttgcagaggcccagggaggtgaggatgagtaagacatggttgggctctgggctttaagcaggaagagtgatgtatctatcaaaaactcaaaaagcccagagttaggtggtggggacaacaataaagtccccatcctcaaaatacagccaggggccagtggggtggggactcaggcaagccactgccaccctgggcctcagtttccccttctgtaaaaagcaatctgaaagcaatctgtgaaatgcagaagtgcttaagatgccgcacctccaccagggcaggtgccacgggcttagatcaccagtttttccgcacctcctcttggcaagagggcctgaacctgcctccgggcaagcctgtccacaccctccagccaccttaattattcccacattcctaacaggaaatctggcccttaaattcaccagcaagcctgcacccagcgccaatgccacgtccctaattaccagcattagcattgctaatctcccgccagccccatcacaggcaccccttgtccatgcagtcctcctgttaataagccggaataatgaggcttcaccgcgcagcgggggccaacaggatgcaggaggattttaatttcagattttggggtcccaagttatgagggacaactgaaagggatcaggaatgatcccaggggctgaaggaggccgcctgagaggctgcctaaatggcccccagagaaacagtgctgggtggggaaggatggggagaggataagagaacactgctctcagactttggtggacaaataaaaataactgggagggagggacttctgtgaagcacctgcttccccacctagaaggcgaaggggccgaaggaagaggcagactaaccccaacagctgggaccttccagagccccggtcagctggacaaggctcagggactagaggcaaactcttggcccatgtgggcaggagtgggtgagatggatacaggggaagggtgccaacacccccttcttcatgtgaaggcatccaaagcttggggtggggctgtggaggtgagtggggggctgtcgtttcatggaatgtaattttaatttccattaatcaacttctaaacattacaactcattgcaatttttaaaggctcaacaaatgtttgctgcatgagcagcgggattcgtgaacagtaacaacccacatccacagcaccccgcagcgccatgcagtcctgatgtcatggactcaggaatgctgcgcgtgctcacaatgaccattcccttaaacctgaggaaatggaggatcagaggttgagtgacctgcccaagaccacccagctaccagtcagccaacacccagaggaagattcccagtcagcaacacccagagggagattccagagacctccagaggtccacgcagtgctacctcctgcaagctacaccgcgccatgccgcaccaccagctctcagcggggacttcgggggctgtgcccttccagggctgtttgccccggagtggatcaggccagtccgtccctctgtgactcggcctctcaatcctacacctcaggaggaagctcagtctcctcctcctcccccgaggccacttcagctctggttttaatctccactgcttagagtaacagcggcggaggaggtgggtcacaaagacctgaaaatcacagatcccaacccagctggatcgctttgttcctctgacgttgtggtgggcacaatgcaaaattgtgagacgccaccaaccccacttcccacgttagcagggggatggggcaggggtggacggagtccaccgtcactttaagcctctgcctcgatgtgggctcgggagcacccactagatgctgggcagggggatacggcggcagggccttcattctggtcaggaaacagacctgctcatggtgaccagccaaggtgaggacggcaggggcacaggctgggggggccacctgccattgattcattcactaacgcagcacccaccccaggtacaggggacacagcactgagtcagaagcagccccgtctcccagggactgcctgttcagtgggcacagacccatcccccaccccatctgtgagaccacagagatgccacttcccagaggagatgacaatgagtaggaccctgaaagaaaagtccacgacatggcccgaggcccagtggggggaatgcggccctggggactcagaacagcctgacatggcacagcaagtctggggccagaagagcctgggatgccaggctcagcatctgcccttgtcccagcaccaccaaagggtccgccttctcccttttcccagccagactcgggacaggagcagaaaatccagagcctgcaacatctcatacttggtgtgggggcctgggacacagatccaggccaccgggacagtgtgtgccaggcaccatctggagggcagccgatgggctctgccagattcctgatccacagtaggaccctgggggcaccctctgcccgaggaccctggaacacacagctcggggacaagagaataactgcagggatctcgccaattcctgactaaccccaccctaggtcagtcccagacttcatccccccagctctgtggaaaggtactattaccatcccactgaacacacagggaaacgtgacctgccaatgctgggaggtggaggaagccagtccagcccaggcagctgactgcagagcccatgtgtgctccaggctgccctaggagcagctgccccacacagggcaccgaggtctgtggccctgaggacacagccaaggcacacggtcagaggagggtgcccacagctcacccacagcctggcccctgagctgaggcccagcgcacgagctgtcggggagccacgtggagggcaggaccacccaggcttccctgggagtggcagtcctaggaggacacccgggacgggggtgcaggagttggttcagcagcaaacccttgccccagctggacctgagtttccccatctttatgatggggtggggctggagtggctgattcctgggggccagggtgaagcgtgtgactcagtgaagaaagggggattcagagcttaggacacaggcctgaggcagggacccacaggcggacccccagcagggagggacccccccccccccatcctcagaagggctgaccaaagccaagagcacacaaagtagatggaagatccggattgaatcctgctcagcaccgcctctgccccccaagccagcccctcctgcccatgatgccctccacgctgctccccaacatgctccggggttgcctgcctgtggccttcgtgccagcacccgctcccccaagcctggagaaaagagctgcctgtagtccctgagcccgtccccaggagcacacagtccctgtgcctgtcccccagtagcacagccaggggctcggggacacagaagcacagggggttgattacacccgaagggccgtaatccctaggacagagctggcccggggaggccagaaaaacccaagcccctattttgttttgagcagagccccatctgagctagatcccagggaagtaccagggaatgtttgggaacgatgagcatgtggggctctgggaaaggccccactagtgctgggggcggcccgatctccagcaggctcagctacatctccgtctcctcgtggggacacgggcagctgcacgcttcctccaggccccgcgggctctagagtcctggcagctggctcacaccgggatacttgactgctgtgccccactcccaccccctttgtaaagcaaacaggtttagatttcgacggacaggtttggggtccacattcagtggccgggcacatgacagcgactcctgggccgtgtgacactcaccctcagctctcaccttagtctctaccagttttggtccaagaagtggcagcagcccaagcatccagcccagcggcaccctggcaccatgctcgtggggcaccgggaaaagccacctgcagcattccaggcccggcttccgagttcctcctagcaactgggtctcatgcagatgaaaacccccaggcctggcgcacagtagctgctcagtcaaatgtcttcagccctttggactcaacagtacacttggaccctgagggaaggaacagcgctgggcctggggtccgaaaacctggcttcaacccagctccctcctctaccctcctgctgctccaccttcggtaagatgctgagccccgcaagcctcagtttctccatctgtaaaggctgcagctgttctgcagacagtgaaggactgtgcgcccagcatccagtggcttccacctatggcgtgtgttgtcaggctatgagaaccctgatggcaaaggtgccctgagcagaagctgaaaaccacgtcctttcaagggaattcggggaggaaataaggttcctttccacgtgcatcttatttctggggcctcaaggtgccaggagccaccgcccaggagctggacgcctgtgctgggaggggcactatggcatgctcacctctgatgtctgtttccatccattcctcctctctggtcatctgaagcaccctctggattctgggagctatcgagacttaatgagggccacctggaggccctgcatcaataacaagtttgtattattgcctcggtatttggacaaattaggaaccccacagccggcgtcagcagagtttgggaatttcctaagatgccaggccaagtccactcctgagcctgcccaccagcaaatgacgcatcacagggccacgctggcccatcctggttcctctatctgctagatgtggatggtggggtcctggccttcgaacgggaatgtctgattcgagaacatccccagagccaggaagaaacaagctgaccgagctcctgatgagtgagtgaatgggtgaatggaggaagaaaccctttgcccagcccatcgcatgggttcagaagctctaatgaagtcaggggcctggaaggaaggacttggggaaggaaagcatccgactgcacagtcaggcaagagctgggcctcgacggtcactcctgccttcctgccgcagtcctgagccttcgtttcctcctctgtgaattagagcgatccttacctcttaggagcacatgagattcctgcataccgggctgcgcctgcacctcaaaggtgcttgcgacggctcactcactccttgcctgtttcccgtattaatttcctgcctctaaatcactggtgaaaacgaggtttgcttctcaggttaccatggcaggaaaaccctccaagtacacaaaaagctgcagaaatcctgggtttcctgaagacctggctcaggtgtgactgtgttaccatctcctccgtgttgggaggcccatgggcacctagctttccccagtgggaacggacaggctcgctctgggtaggagcagcaggggtctgacccaggctcccccagcgccctgtgaatggggcgatttaactccgtctgagtgacatgaagcatgggaggcacttgtctgtgcttcccaagcagccgcccctagaaatctgagaccctcccatccttgggtgggaattgagagtacatggggttttgtgctttctgcagaatcacctgcgcttgagtgcacggggcctgtttcccagcacagtgcccacacagctggggcttgtttccctggctccagccccagccccaaatccccacactgctcagatcccctgcacctgggctgcagggcaatgagtgcctccagaagggcctgatcgtggggacagggagtgatagggaaccccaggaacgccatcttccagcacctgaccagtctcctcccaaatactgttggcagaattggggggggggtggtataaagcagtcctgcttaccttgaccttggcaggaagctgtgggtaagcacgaggggtcagcctgaacctgagtctggggctccaaagggggctgagtgcctcccagatggtaccagaactctttgggcctcaggccccaggcagtgagatggggaagatgctaccatcccctcctgaggatgacctcagggccacccgtgctgttccttctgcctgggtcgctctgtcccctgcctcttgcccaagtcacccacttactccccaaataattaccaagttcctacagtgtgccaagcacccagaactaactacacacaggtggacaccgccctggcctccaccggctcatcagggagagtcaggccctgcgggagggaagcatgggggctgggaggcctgctggagccagagtggtcacggaaggcttcccagaggaggtgcactgcggcagagcccaggctgagagtggagggggcaccacgtacttctggggctcggggtggggagggatgccagagactagagaggctccctatctctgagaagcttcccctgacacccccaaacgaggccagataccccaattctgccctctaccagcaccttctatgccctcccgacatgcctacaatctcgatccctcctgctgggctctcatctctcagagcgtagggagtaggtcatgtctcgaagagtgctggcgtcctgggcgctcagtgtacacgtactgagtgggatgggaaagaggaaacacggaaagtcctgttattatggatggatgaaagggtggacggatggtgggtggacggatggaagggtagatggacagtgggtggacatacggaagggtggatggacgggtagatggatggacagtggttgtatggatggatgggtggatggatggatgggtggatggacggtgcgtgggtagaatcaattccaccttcctgcagaagactctcctgcctcatgttccatctcagggggatgctcaggattccaggggctgaaaatattccaggttgcaggggctgcacaccacactccccaccccagcccaaggccatgaacatggcagggaagacagaagcctgtggctggggaacctttggtgacactgtggaggcccctgctagctcagccacctgccacagaaggatggagggtagcagggcctctggtgactctgcaggacctggaaacggggcacaggatagaggctggccaagcagatgctccgtttaagggggctgcggccaattggcatcactgaagcccaatgacaatgccaccaggaggtcctgttattcatcccctgttaaacgtgagaaaaccaaggcacactggagttaagcaagtggtccaagatcacgcactgcgtgggtggcagagcccttccccatgagaagcctggccttgcaggctgagctgtcccagtccccaggcaagatccccgcccccacccttggccctgctattctcagtgcttctggaagggctgcctccagtctgtgtgttgccattctgagcacctactcggcaccaagcattctgttcacgttcatgatctcatttaaaatgatctcgcaaggcagggctctgctgcctttgtttttaagcagaccgacgcatgggcaggtgactgacagccatggatgctaacttaggaagtgcccgctgggccttaaatcctggccagcgccagggcccagccccctgccctatagaacctctcagccacgcagctcccatgaatggcctggcagagggaagggctctgggccctccaggtgtgctgggtgcatctcctgggacaggctgggcccagagcactcaccgcagccccgctcggcagcacaggcaccaaattctgcctctctgtcatgtcacaccttccacgcggaccctgtggggaccagagtgtgaattctgctttcgtacctgctcttgccactgccatccatgaaaggcctgaggataggggtcaggtggagtctgggtctccaagcacagggctgatgaccagggtgtggccctggctcccggaagctcagatatgtttcagtttgtcacttcggctctgcttggtgtgcttccttttcttttttacttatccagatacgacttacaaacagcgatgtgcgcaggtcttaagggtacagctggaggaactcctcctgcatccacacccagacaatgaccgctgagttcaggatccagagcacagggcgccagagcctcctccccgctgttgtccctcctccccgctgttgtccctcctccccactgctgtcccgttcggacgtgatgctgcctgttttgtaccttacatcagtggtctccaacctttttggcacagagaccagctccgtggaagatggtttttccacggacctgggagggagatggttttgggatgattcaagcacattacatttattgtgtagtttatttctgttattattacattgtaatagataatgaaataattacacgactcaccataacatagcataagtgggaaatctgagcttgttttcctgcaactagacagtcccatctgcgggtgggtgatggggacagtgacaccctaaatgtgttgcttatgtccagtctactccatcatctcgttttggttgctgtcactgcagaaaactctgcttcaggctgggcgcagtggctcatgcctgtaatcccggcactctgggaggccgaggcgggcagatcatctgatgtcgggagtttgagactagcctagccaacacggcaaaatccatctctactaaaaataaaataaaaaaaaacatttagctaggtgtggtggtgcagaactgtagtcccagatacttgggaggctgaggcacaagaatcgctcgaacccgggaggcagaggtggcagtgagccgagactgtgccactgcactccagcatgggtgacagagtgagactctgtctggaaaaaaaaaaaaaaaagagagacagagaaaacccggcttcacaaagacaggatgctggacatggaagcaggcttttcagtgctcacgtggcaatctcaggatattccactttgacttttatccagaacatatggagatttgaagttgtctcaaacacacttttagggccactgtcatttgcagtctcaagcagttgatcctcttctagcacagacaaaggtgattcgcgtggcttatccacaaatgggtcacagatccattccttcccagtttggggttctttggtggttgggaagtaacgctcaagctcttttgaaagctgaggtaggggccgggcgcggtggctcacgcctgtaatcccagcactttgggaggtggaggcagcagatcacctgaggtcaggagttcagtaccagcctgaccaacatggagaaaccccgtctctactaaaaatacaaaattagttgggtgtagtggcgcatgcctgtaatcccagatacttgggaggctgaggcaggagaactgcttgaacctgggaggcggaggttgcggtgagccaagatcgtgccattgcacttcagcctgggtaacaagagcgaaactccatctcaaaaaaaagaaaaaaaaaaaaaaagaaaaaagagagctgaggtaggtgatcatgcaccagctggaagagggaaggccctggctctatctctttcaaaatctctgctaatgtttgaaacatgtcaaaaatcccagtgttccctcgtcacccccataattccaatttggctttgaatgcagccactttatctgccgacttgaacacagttgtcattcttccctgaagtgacagattgagtttgttgagcaggttgaatacgtcgcacaagtcagcaagttttgcgactcatcctatgtcactgaaatatgctgctagtggggactatttttctaaaagaaatctctggagcagctctcataactcagaaactctggccagtgatctacctttggaaagcatctcacttctgtgtatcagagaagacgtgtgtgtaccgcgtccatctcctcacagagccgcgagaacagacctcgtgagttaaaggcatgcactttgctgtggctgatc

SEQ ID NO: 357 - DNA, 3301 bp, human
  misc_feature (2966)..(2972): n is a, c, g, or t
gaattctgcggagcctgcgggacggcggcgggttggcccgtaggcagccgggacagtgttgtacagtgttttgggcatgcacgtgatactcacacagtggcttctgctcaccaacagatgaagacagatgcaccaacgagggtctggaatggtctggagtggtctggaaagcagggtcagatacccctggaaaactgaagcccgtggagcaatgatctctacaggactgcttcaaggctgatgggaaccaccctgtagaggtccatctgcgttcagacccagacgatgccagagctatgactgggcctgcaggtgtggcgccgaggggagatcagccatggagcagccacaggaggaagcccctgaggtccgggaagaggaggagaaagaggaagtggcagaggcagaaggagccccagagctcaatgggggaccacagcatgcacttccttccagcagctacacagacctctcccggagctcctcgccaccctcactgctggaccaactgcagatgggctgtgacggggcctcatgcggcagcctcaacatggagtgccgggtgtgcggggacaaggcatcgggcttccactacggtgttcatgcatgtgaggggtgcaagggcttcttccgtcgtacgatccgcatgaagctggagtacgagaagtgtgagcgcagctgcaagattcagaagaagaaccgcaacaagtgccagtactgccgcttccagaagtgcctggcactgggcatgtcacacaacgctatccgttttggtcggatgccggaggctgagaagaggaagctggtggcagggctgactgcaaacgaggggagccagtacaacccacaggtggccgacctgaaggccttctccaagcacatctacaatgcctacctgaaaaacttcaacatgaccaaaaagaaggcccgcagcatcctcaccggcaaagccagccacacggcgccctttgtgatccacgacatcgagacattgtggcaggcagagaaggggctggtgtggaagcagttggtgaatggcctgcctccctacaaggagatcagcgtgcacgtcttctaccgctgccagtgcaccacagtggagaccgtgcgggagctcactgagttcgccaagagcatccccagcttcagcagcctcttcctcaacgaccaggttacccttctcaagtatggcgtgcacgaggccatcttcgccatgctggcctctatcgtcaacaaggacgggctgctggtagccaacggcagtggctttgtcacccgtgagttcctgcgcagcctccgcaaacccttcagtgatatcattgagcctaagtttgaatttgctgtcaagttcaacgccctggaacttgatgacagtgacctggccctattcattgcggccatcattctgtgtggagaccggccaggcctcatgaacgttccacgggtggaggctatccaggacaccatcctgcgtgccctcgaattccacctgcaggccaaccaccctgatgcccagtacctcttccccaagctgctgcagaagatggctgacctgcggcaactggtcaccgagcacgcccagatgatgcagcggatcaagaagaccgaaaccgagacctcgctgcaccctctgctccaggagatctacaaggacatgtactaacggcggcacccaggcctccctgcagactccaatggggccagcactggaggggcccacccacatgacttttccattgaccagctctcttcctgtctttgttgtctccctctttctcagttcctctttcttttctaattcctgttgctctgtttcttcctttctgtaggtttctctcttcccttctcccttctcccttgccctccctttctctctcctatccccacgtctgtcctcctttcttattctgtgagatgttttgtattatttcaccagcagcatagaacaggacctctgcttttgcacaccttttccccaggagcagaagagagtgggcctgccctctgccccatcattgcacctgcaggcttaggtcctcacttctgtctcctgtcttcagagcaaaagacttgagccatccaaagaaacactaagctctctgggcctgggttccagggaaggctaagcatggcctggactgactgcagccccctatagtcatggggtccctgctgcaaaggacagtggcagaccccggcagtagagccgagatgcctccccaagactgtcattgcccctccgatcgtgaggccacccactgacccaatgatcctctccagcagcacacctcagccccactgacacccagtgtccttccatcttcacactggtttgccaggccaatgttgctgatggcccctccagcacacacacataagcactgaaatcactttacctgcaggcaccatgcacctcccttccctccctgaggcaggtgagaacccagagagaggggcctgcaggtgagcaggcagggctgggccaggtctccggggaggcaggggtcctgcaggtcctggtgggtcagcccagcacctcgcccagtgggagcttcccgggataaactgagcctgttcattctgatgtccatttgtcccaatagctctactgccctccccttcccctttactcagcccagctggccacctagaagtctccctgcacagcctctagtgtccggggaccttgtgggaccagtcccacaccgctggtccctgccctcccctgctcccaggttgaggtgcgctcacctcagagcagggccaaagcacagctgggcatgccatgtctgagcggcgcagagccctccaggcctgcaggggcaaggggctggctggagtctcagagcacagaggtaggagaactggggttcaagcccaggcttcctgggtcctgcctggtcctccctcccaaggagccattctatgtgactctgggtggaagtgcccagcccctgcctgacggnnnnnnngatcactctctgctggcaggattcttcccgctccccacctacccagctgatgggggttggggtgcttctttcagccaaggctatgaagggacagctgctgggacccacctccccccttccccggccacatgccgcgtccctgcccccacccgggtctggtgctgaggatacagctcttctcagtgtctgaacaatctccaaaattgaaatgtatatttttgctaggagccccagcttcctgtgtttttaatataaatagtgtacacagactgacgaaactttaaataaatgggaattaaatatttaaaaaaaaaagcggccgcgaattc

SEQ ID NO: 358 - DNA, 5641 bp, human
cggaggaggacgcgagccccttgcgggcggtcatcacagcccagcctcggggctgccacagcgcgttgcgcctgtgcgccctcggtccccgcgtccactgagcgccgcgctcggggatggggcccggccggccggcccccgcgccctggcctcgtcacctgctgcgctgcgtcctgctcctcgggtgcctgcacctcggccgtcccggcgcccctggggacgccgccctcccggaacccaacgtcttcctcatcttcagccatggactgcagggctgcctggaggcccagggcgggcaggtcagagtcaccccggcttgcaataccagcctccctgcccagcgctggaagtgggtctcccgaaaccggctattcaacctgggtaccatgcagtgcctgggcacaggctggccaggcaccaacaccacggcctccctgggcatgtatgagtgtgaccgggaagcactgaatcttcgctggcattgtcgtacactgggtgaccagctgtccttgctcctgggggcccgcaccagcaacatatccaagcctggcacccttgagcgtggtgaccagacccgcagtggccagtggcgcatctacggcagcgaggaggacctatgtgctctgccctaccacgaggtctacaccatccagggaaactcccacggaaagccgtgcaccatccccttcaaatatgacaaccagtggttccacggctgcaccagcacgggccgcgaggatggtcacctgtggtgtgccaccacccaggactacggcaaagacgagcgctggggcttctgccccatcaagagtaacgactgcgagaccttctgggacaaggaccagctgactgacagctgctaccagtttaacttccagtccacgctgtcgtggagggaggcctgggccagctgcgagcagcagggtgcggatctgctgagcatcacggagatccacgagcagacctacatcaacggcctcctcactgggtacagctccaccctgtggatcggcttgaatgacttggacacgagcggaggctggcagtggtcggacaactcgcccctcaagtacctcaactgggagagtgaccagccggacaaccccagtgaggagaactgtggagtgatccgcactgagtcctcgggcggctggcagaaccgtgactgcagcatcgcgctgccctatgtgtgcaagaagaagcccaacgccacggccgagcccacccctccagacaggtgggccaatgtgaaggtggagtgcgagccgagctggcagcccttccagggccactgctaccgcctgcaggccgagaagcgcagctggcaggagtccaagaaggcatgtctacggggcggtggcgacctggtcagcatccacagcatggcggagctggaattcatcaccaagcagatcaagcaagaggtggaggagctgtggatcggcctcaacgatttgaaactgcagatgaattttgagtggtctgacgggagccttgtgagcttcacccactggcacccctttgagcccaacaacttccgggacagtctggaggactgtgtcaccatctggggcccggaaggccgctggaacgacagtccctgtaaccagtccttgccatccatctgcaagaaggcaggccagctgagccagggggccgccgaggaggaccatggctgccggaagggttggacgtggcacagcccatcctgctactggctgggagaagaccaagtgacctacagtgaggcccggcgcctgtgcactgaccatggctctcagctggtcaccatcaccaacaggttcgagcaggccttcgtcagcagcctcatctacaactgggagggcgagtacttctggacggccctgcaggacctcaacagcaccggctccttcttctggctcagtggggatgaagtcatgtacacccactggaaccgggaccagcccgggtacagccgtgggggctgcgtggcgctggccactggcagcgccatggggctgtgggaggtgaagaactgtacctcgttccgggcccgctacatctgccggcagagcctgggcactccagtgacgccggagctgccggggccagatcccacgcccagcctcactggctcctgtccccagggctgggcctcggacaccaaactccggtattgctataaggtgttcagctcagagcggctgcaggacaagaagagctgggtccaggcccagggggcctgccaggagctgggggcccagctgctgagcctggccagctacgaggaggagcactttgtggccaacatgctcaacaagatcttcggtgaatcagaacccgagatccacgagcagcactggttctggatcggcctgaaccgtcgggatcccagagggggtcagagttggcgctggagcgacggcgtagggttctcttaccacaatttcgaccggagccggcacgacgacgacgacatccgaggctgtgcggtgctggacctggcctccctgcagtgggtggccatgcagtgcgacacacagctggactggatctgcaagatccccagaggtacggacgtgcgggagcccgacgacagccctcaaggccgacgggaatggctgcgcttccaggaggccgagtacaagttctttgagcaccactccacgtgggcgcaggcgcagcgcatctgcacgtggttccaggccgagctgacctccgtgcacagccaggcagagctagacttcctgagccacaacttgcagaagttctcccgggcccaggagcagcactggtggatcggcctgcacacctctgagagcgatgggcgcttcagatggacagatggttccattataaacttcatctcctgggcaccaggcaaacctcggcctgtcggcaaggacaagaagtgcgtgtacatgacagccagccgagaggactggggggaccagaggtgcctgacagccttgccctacatctgcaagcgcagcaacgtcaccaaagaaacgcagcccccagacctgccaactacagccctggggggctgcccctctgactggatccagttcctcaacaagtgttttcaggtccagggccaggaaccccagagccgggtgaagtggtcagaggcacagttctcctgtgaacagcaagaggcccagctggtcaccatcacaaaccccttagagcaagcattcatcacagccagcctgcccaatgtgacctttgacctttggattggcctccatgcctcgcagagggacttccagtgggtggagcaggagcctttgatgtatgccaactgggcacctggggagccctctggccctagccctgctcccagtggcaacaaaccgaccagctgtgcggtggtcctgcacagcccctcagcccacttcactggccgctgggacgatcggagctgcacggaggagacccatggcttcatctgccagaagggcacggacccctccctgagcccgtccccagcagcgctgccccccgccccgggcactgagctctcctacctcaacggcaccttccggctgcttcagaagccgctgcgctggcacgatgccctcctgctgtgtgagagccacaatgccagcctggcctacgtgcccgacccctacacccaggccttcctcacgcaggctgcccgagggctgcgcacgccgctctggattgggctggctggcgaggagggctctcggcggtactcctgggtctcagaggagccgctgaactacgtgggctggcaggacggggagccgcagcagccggggggctgtacctacgtagatgtggacggggcctggcgcaccaccagctgtgacaccaagctgcagggggctgtgtgtggggttagcagtgggccccctcctccccgaagaataagctaccatggcagctgtccccagggactggcagactccgcgtggattcccttccgggagcactgctattctttccacatggagctgctgctgggccacaaggaggcgcgacagcgctgccagagagcgggtggggccgtcctgtctatcctggatgagatggagaatgtgtttgtctgggagcacctgcagagctatgagggccagagtcggggcgcctggctgggcatgaacttcaaccccaaaggaggcactctggtctggcaggacaacacagctgtgaactactccaactgggggcccccgggcttgggccccagcatgctgagccacaacagctgctactggattcagagcaacagcgggctatggcgccccggcgcttgcaccaacatcaccatgggtgtcgtctgcaagcttcctcgtgctgagcagagcagcttctccccatcagcgcttccagagaacccagcggccctggtggtggtgctgatggcggtgctgctgctcctggccttgctgaccgcagccctcatcctttaccggaggcgccagagcatcgagcgcggggcctttgagggtgcccgctacagccgcagcagctccagccccaccgaggccactgagaagaacatcctggtgtcagacatggaaatgaatgagcaacaagaatagagccaggcgcgtgggcagggccagggcgggaggagctggggagctggggccctgggtcagtctggccccccaccagctgcctgtccagttggcctatggaagggtgcccttgggagtcgctgttgggagccggagctgggcagagcctgggctggtggggtgccaccctcccacaagggctgggctgagacccagctgagtgcagcgtggcgtttccctttctgggggggcctgaggtcttgtcacctggtcctgtgcccccacaggaaccagaggtaggatgggagggggaacgagagcctctttctccccagagcccccggcccaggcctgttgatccgcgccccaggacccccttctttgcagagcccgaggagcctcccctgtcccctcgggcagatctgttgtgtctctcttcccacctggcagcctcagctctgtgcccctcaccctgctccctctcgccccttctctcccaccccttccttctgagccgggccctggggattggggagccctcttgttcctgatgagggtcagctgagggggctgagcatccatcactcctgtgcctgctggggtggctgtggggcgtggcaggaggggcctaggtgggttgggcctgagaaccagggcacgggtgtggtgtctgctgggctggagataagactggggagagacaccccaacctcccagggtgggagctgggccgggctgggatgtcatctcctgccgggcgggggagggctctgcccctggaagagtcccctgtggggaccaaaataagttccctaacatctccagctcctggctctggtttggagcaaggggaagggttgccagagtcctgggggccccagaggagcaggagtctgggagggcccagagttcaccctctagtggatccaggaggagcagcacccgagccctggagtggcccagtacccttccaagaggccacagtcccagccaggacaaagtatgcggcccatcctggtgcgacagcgtgggacaatgtgaacatggactcgaagacatggccctttctctgtagttgattttttaaatgtgccattattgttttt

SEQ ID NO: 359 - DNA, 991 bp, human
cttatctcggcttcgtttctggagggccaggaacaaacaggcttcaaagccaagggcttggctggcacacagggggcttggtccttcacctctgtcccctctccctacggacacatataagaccctggtcacacctgggagaggaggagaggagagcatagcacctgcagcaagatggatgtgggcagcaaagaggtcctgatggagagcccgccggactactccgcagctccccggggccgatttggcattccctgctgcccagtgcacctgaaacgccttcttatcgtggtggtggtggtggtcctcatcgtcgtggtgattgtgggagccctgctcatgggtctccacatgagccagaaacacacggagatggttctggagatgagcattggggcgccggaagcccagcaacgcctggccctgagtgagcacctggttaccactgccaccttctccatcggctccactggcctcgtggtgtatgactaccagcagctgctgatcgcctacaagccagcccctggcacctgctgctacatcatgaagatagctccagagagcatccccagtcttgaggctctcaatagaaaagtccacaacttccagatggaatgctctctgcaggccaagcccgcagtgcctacgtctaagctgggccaggcagaggggcgagatgcaggctcagcaccctccggaggggacccggccttcctgggcatggccgtgaacaccctgtgtggcgaggtgccgctctactacatctaggacgcctccggtgagcagggtcagtggaagccccaacgggaaaggaaacgccccgggcaaagggtcttttgcagcttttgcagacgggcaagaagctgcttctgcccacaccgcagggacaaaccctggagaaatgggagcttggggagaggatgggagtgggcagaggtggcacccaggggcccgggaactcctgccacaacagaataaagcagcctgattg

SEQ ID NO: 360 - DNA, 662 bp, human; identical to SEQ ID NO: 350
  misc_feature (261)..(261): n is a, c, g, or t
  misc_feature (567)..(567): n is a, c, g, or t
  misc_feature (651)..(651): n is a, c, g, or t

SEQ ID NO: 361 - DNA, 516 bp, human
atccctcttcccatcaatatcctaaatgttttgggagggccagagaatggcacccaagagcctgcggggatgccatcccacacaccccacccagctgttctaaccctgctatccacagccctggaggaactggggctcctggaaggaggaggaggctctccactgtccaccctaacacataccctcccacccaccttccagacccccttggttggcaccctctcctccggttccctctcaccccatggctgtgaatgacaggacaggtcacacgtgtgttttccattgggtttaatttaatggacgtgcagtttcatttgtaaattgtgcattagccacctccttcagtggcaggatgtgagtggctacctggctcaactggaggggacccttgggccctctggggcttccctccccacctggttggggtagagcaaaggatggtcactcttccgrggtctccctgaaatgaatgtatttctccccaaaagggctgatatttaatgtttaataagg

SEQ ID NO: 362 - DNA, 3310 bp, human
ggcacgagggcactgagctctgccgcctggctctagccgcctgcctggcccccgccgggactcttgcccaccctcagccatggctccgatatctctgtcgtggctgctccgcttggccaccttctgccatctgactgtcctgctggctggacagcaccacggtgtgacgaaatgcaacatcacgtgcagcaagatgacatcaaagatacctgtagctttgctcatccactatcaacagaaccaggcatcatgcggcaaacgcgcaatcatcttggagacgagacagcacaggctgttctgtgccgacccgaaggagcaatgggtcaaggacgcgatgcagcatctggaccgccaggctgctgccctaactcgaaatggcggcaccttcgagaagcagatcggcgaggtgaagcccaggaccacccctgccgccgggggaatggacgagtctgtggtcctggagcccgaagccacaggcgaaagcagtagcctggagccgactccttcttcccaggaagcacagagggccctggggacctccccagagctgccgacgggcgtgactggttcctcagggaccaggctccccccgacgccaaaggctcaggatggagggcctgtgggcacggagcttttccgagtgcctcccgtctccactgccgccacgtggcagagttctgctccccaccaacctgggcccagcctctgggctgaggcaaagacctctgaggccccgtccacccaggacccctccacccaggcctccactgcgtcctccccagccccagaggagaatgctccgtctgaaggccagcgtgtgtggggtcagggacagagccccaggccagagaactctctggagcgggaggagatgggtcccgtgccagcgcacacggatgccttccaggactgggggcctggcagcatggcccacgtctctgtggtccctgtctcctcagaagggacccccagcagggagccagtggcttcaggcagctggacccctaaggctgaggaacccatccatgccaccatggacccccagaggctgggcgtccttatcactcctgtccctgacgcccaggctgccacccggaggcaggcggtggggctgctggccttccttggcctcctcttctgcctgggggtggccatgttcacctaccagagcctccagggctgccctcgaaagatggcaggagagatggcggagggccttcgctacatcccccggagctgtggtagtaattcatatgtcctggtgcccgtgtgaactcctctggcctgtgtctagttgtttgattcagacagctgcctgggatccctcatcctcatacccacccccacccaagggcctggcctgagctgggatgattggaggggggaggtgggatcctccaggtgcacaagctccaagctcccaggcattccccaggaggccagccttgaccattctccaccttccagggacagagggggtggcctcccaactcaccccagccccaaaactctcctctgctgctggctggttagaggttccctttgacgccatcccagccccaatgaacaattatttattaaatgcccagccccttctgacccatgctgccctgtgagtactacagtcctcccatctcacacatgagcatcaggccaggccctctgcccactccctgcaacctgattgtgtctcttggtcctgctgcagttgccagtcaccccggccacctgcggtgctatctcccccagccccatcctctgtacagagcccacgcccccactggtgacatgtcttttcttgcatgaggctagtgtggtgtttcctgggcactgcttccagtgaggctctgcccttggttaggsattgtgggaaggggagataagggtatctggtgactttcctctttggtctacactgtgctgagtctgaaggctgggttctgatcctagttccaccatcaagccaccaacatactcccatctgtgaaaggaaagagggaggtaaggaatacctgtccccctgacaacactcattgacctgaggcccttctctccagcccctggatgcagcctcacagtccttaccagcagagcaccttagacagtccctgccaatggactaacttgtctttggaccctgaggcccagagggcctgcargggagtgagttgatagcacagaccctgccctgtgggcccccaaatggaaatgggcagagcagagaccatccctgaaggccccgcccaggcttagtcactgagacagcccgggctctgcttcccatcacccgctaagagggagggagggctccagacacatgtccaagaagcccaggaaaggctccaggagcagccacattcctgatgcttcttcagagactcctgcaggcagccaggccacaagacccttgtggtcccaccccacacacgccagattctttcctgaggctgggctcccttcccacctctctcactccttgaaaacactgttctctgccctccaagaccttctccttcacctttgtccccaccgcagacaggaccaggggatttccatgatgttttccatgagtcccctgtttgtttctgaaagggacgctacccgggaagggggctgggacatgggaaaggggaagttgtaggcataaagtcaggggttcccttttttggctgctgaaggctcgagcatgcctggatggggctgcaccggctggcctggcccctcagggtccctggtggcagctcacctctcccttggattgtccccgacccttgccgtctacctgaggggcctcttatgggctgggttctacccaggtgctaggaacactccttcacagatgggtgcttggaggaaggaaacccagctctggtccatagagagcaaaacgctgtgctgccctgcccaccctggcctctgcactcccctgctgggtgtggcgcagcatattcaggaagctcagggccctggctcaggtggggtcactctggcagctcagagagggtgggagtgggtccaatgcactttgttctggctcttccaggctgggagagcctttcaggggtgggacaccctgtgatggggccctgcctcctttgtgaggaagccgctggggccagttggtcccccttccatggactttgttagtttctccaagcaggacatggacaaggatgatctaggaagactttggaaagagtaggaagactttggaaagacttttccaaccctcatcaccaacgtctgtgccattttgtattttactaataaaatttaaaagtcttgtgaaaaaaaaaaaaaaaaaaaaaaa

SEQ ID NO: 363 - DNA, 532 bp, human
gaccaccacttgcctcccccgcctctcttgcctcaaccagagtggaaggtgatggggatgctacgttcctctccctgggagtgggcagagtctcagtacgtggtccatggacccttggaggcctggaagcttctgactctccatcaggaagtggtgatgcaccaggctgcaggactgcccttgctggcgcctgggagagtgactcctcctgtgctgctggctcagtggggagagaggcctcatggcccgggctgctgagctcgctgggccatgcccacagagcctcattctccacctcctcctcttcttcttcctcctctatctcttcttcatcttcatatttctcttcttcctacaatgccttaccttcctcttctgagaaccccgtgggctgtaccatggatagtgtatcaaattctatgagcgtcctaggggcctctgctgggtctcctgcagtggagctttcaccttcttcgtcctccatgatgtggatggagtagatggacccactggattcactctctgtgccttc

SEQ ID NO: 364 - DNA, 23 bp, human
gaaagcggaggagtgtcaatcca

SEQ ID NO: 365 - DNA, 26 bp, human
ggttttcgtctagcatcttctcttta

SEQ ID NO: 366 - DNA, 30 bp, human
atctacaaggacagagactggataatgttg

SEQ ID NO: 367 - DNA, 24 bp, human
gtgagctgtgaagaggagcaggaa

SEQ ID NO: 368 - DNA, 22 bp, human
ctttggtcccagctcccgttca

SEQ ID NO: 369 - DNA, 30 bp, human
cctcaggggattttggcagtggtgggtccg

SEQ ID NO: 370 - DNA, 24 bp, human
taaactccgccatcctcgtatcaa

SEQ ID NO: 371 - DNA, 24 bp, human
cagtggtgacaatctggcacacaa

SEQ ID NO: 372 - DNA, 25 bp, human
ccgtgcccatgcccgtacccgtgca

SEQ ID NO: 373 - DNA, 26 bp, human
ctgaagcaggatacatatgacgtgca

SEQ ID NO: 374 - DNA, 23 bp, human
agggtccagggcaggtttcgaca

SEQ ID NO: 375 - DNA, 27 bp, human
catggcagtcgcacacagtggccctga

SEQ ID NO: 376 - DNA, 26 bp, human
tggtgccatgacaatggtgtgaacta

SEQ ID NO: 377 - DNA, 26 bp, human
catcatcgtaacacgttgcctcatga

SEQ ID NO: 378 - DNA, 30 bp, human
aagattggagagaagtgggaccgtcaggga

SEQ ID NO: 379 - DNA, 23 bp, human
catctgtgacaacactggcctca

SEQ ID NO: 380 - DNA, 23 bp, human
gccacacttgtcgtcttgaggaa

SEQ ID NO: 381 - DNA, 34 bp, human
caaattccccgaagactttgagtcttgtgacagc

SEQ ID NO: 382 - DNA, 23 bp, human
aacctgcgtagactccgggaggc

SEQ ID NO: 383 - DNA, 21 bp, human
gccagtgcgtgtccacctgca

SEQ ID NO: 384 - DNA, 30 bp, human
ctcgggtgacttggatctccatgtcgctgg

SEQ ID NO: 385 - DNA, 24 bp, human
tgaaagttccagggcttcactgaa

SEQ ID NO: 386 - DNA, 24 bp, human
agctgaggtagtgtgcatcccaga

SEQ ID NO: 387 - DNA, 35 bp, human
ctaccagtggttgaaagaaagaattgtaagtgaag

SEQ ID NO: 388 - DNA, 24 bp, human
tagctgttgcgtggtgcctgagaa

SEQ ID NO: 389 - DNA, 26 bp, human
tgatgtcatctttgggagaacctgaa

SEQ ID NO: 390 - DNA, 30 bp, human
aaggtgtgagttctgtgctcctgggatcat

SEQ ID NO: 391 - DNA, 26 bp, human
gaaagaagtaggagtgggctttgcca

SEQ ID NO: 392 - DNA, 26 bp, human
ggcccagtatgaaggaaatctcagta

SEQ ID NO: 393 - DNA, 35 bp, human
aaaggtactttcagatttaatggtgatcacatccc

SEQ ID NO: 394 - DNA, 27 bp, human
aggaaagtcaagagcaccataacctta

SEQ ID NO: 395 - DNA, 25 bp, human
gacgcattccaccaccagtttatca

SEQ ID NO: 396 - DNA, 30 bp, human
ttgattttccatcccatttctgcacatgta

SEQ ID NO: 397 - DNA, 26 bp, human
gggtaaatctggcccttggaactaca

SEQ ID NO: 398 - DNA, 26 bp, human
cccgttggtcacctagaattgaggta

SEQ ID NO: 399 - DNA, 30 bp, human
cccagaggaagttcgtgctgttctggaaaa

SEQ ID NO: 400 - DNA, 23 bp, human
tgcatcagatggctgggctttta

SEQ ID NO: 401 - DNA, 23 bp, human
gctctggttctgcatggtgtcca

SEQ ID NO: 402 - DNA, 30 bp, human
catcagaaatcaccagaaccttcaggatcg

SEQ ID NO: 403 - DNA, 25 bp, human
tcacccacactgtgcccatctacga

SEQ ID NO: 404 - DNA, 25 bp, human
cagcggaaccgctcattgccaatgg

SEQ ID NO: 405 - DNA, 26 bp, human
atgccctcccccatgccatcctgcgt

SEQ ID NO: 406 - DNA, 23 bp, human
gcatggtgatctttgtgaggcga

SEQ ID NO: 407 - DNA, 22 bp, human
ctcctggtggtcctgcatctca

SEQ ID NO: 408 - DNA, 30 bp, human
ctcaccaacagcgtggagcctgcacaagga

SEQ ID NO: 409 - DNA, 23 bp, human
actccagcttgctgagttcccca

SEQ ID NO: 410 - DNA, 23 bp, human
actccagcttgctgagttcccca

SEQ ID NO: 411 - DNA, 32 bp, human
attattacagttccacatcaaggccgagtgca

SEQ ID NO: 412 - DNA, 26 bp, human
gggtgcttttcatgaggtttgtgtca

SEQ ID NO: 413 - DNA, 26 bp, human
tgaggtaggcagactgtcgtaaggcc

SEQ ID NO: 414 - DNA, 34 bp, human
ccaacactgctgacatttctcagagatttcaaat

SEQ ID NO: 415 - DNA, 25 bp, human
cctggaaatgaagaggaagaatcaa

SEQ ID NO: 416 - DNA, 26 bp, human
agctctgactggaatctggagagtga

SEQ ID NO: 417 - DNA, 32 bp, human
aatcttcaccactcttgaccctgcttctctgg

SEQ ID NO: 418 - DNA, 26 bp, human
tggctggtcaggatatacaaggtaaa

SEQ ID NO: 419 - DNA, 26 bp, human
tcaacgtcctaaatgtgatgtgctca

SEQ ID NO: 420 - DNA, 32 bp, human
cctggataatcgaggcttgtcaaggacataaa

SEQ ID NO: 421 - DNA, 26 bp, human
tctgaaagtgataaaggaagctgcta

SEQ ID NO: 422 - DNA, 26 bp, human
ctttagatctgttaagctggacacac

SEQ ID NO: 423 - DNA, 34 bp, human
cttgaagaaacacaacttatttgaagataacatg

SEQ ID NO: 424 - DNA, 23 bp, human
acggcctataacgagaccctgca

SEQ ID NO: 425 - DNA, 25 bp, human
gaagaggagggtcggtttccattaa

SEQ ID NO: 426 - DNA, 29 bp, human
ttctcacgagtgcgtcagggcatctgtgc

SEQ ID NO: 427 - DNA, 24 bp, human
atttgaccctacactggctccagc

SEQ ID NO: 428 - DNA, 26 bp, human
gatccagtgctgatagcaaccctgta

SEQ ID NO: 429 - DNA, 32 bp, human
actcctgttgtcgggggactaacctatcgaga
